United States Patent Application Publication US 2025/0195589 A1 - sequence listing, part 2

SEQ ID NO: 3 - DNA, 2322073 bp, Lactobacillus crispatus
  source 1..2322073: mol_type = genomic DNA
ttgttcgacattaataaattttgggaacactttaatgacgagatgcgtgctcgtttcaacgaagttgcctacaatgcatggttcaaaaatactaaacctatttcatataatggaaaaacacatgaattaaaaattttagttcaaaatcctgtttctaaaggttactgggaaaagaatctatcttctcaattgattcaatctgcctacggttatgccgacatcgagatcttacctgtatttaaaatatctgaagatgcggatattacagaaaggatcgtaacacctgcgccaaagcgtgatgcgcaagttcaacagcctaatttgccagaaaaagaattcactaaagacttgaagttaaacgaaaaatacacttttgataacttcgttcaaggtgagggaaacaagttggccgccggtgctgcacttgctgtagccgacagtcctggtagtttttacaatcctttatttatttttggtggcgttggtttaggtaaaacacacctgatgcaagctgttgggcatcaaatgctagcagagcgacctaacgcaaaagttgtctatatacagagtgaaacttttgttaatgacttcattaattccatcaaaaataaaacgcaggacaaattccgcgaaaaatacagaacttgtgacctgcttttagttgatgatattcaattttttgccaaaaaagaggggattcaagaggaattcttccatacttttgagacactttataacgatcaaaaacagatcgtaatgactagcgatcggttgcctacagaaatcccagatctatcagagcgtttagtttctcgatttacatggggcttgcaagtcgaaattacgcctcccgatttggaaaccagaatcgctattttgcgacgcaaagctgaaacagaaggtttgactatcgatgatggtacgcttaactatattgcatctcaagttgatactaacattagagaacttgaaggggctttagttaaagttcaagcttatgccacaattgaaaaagcagatattgacgttaaccttgcgcgtgaagcattagttgacctcaaattagttcaaaaaaatcgtggattacaaatctctaaaatacaggaggttgtcgcaaactatttccaaacttcaactgctgaattaaagggtaaaaagcgtgtacggcagattgtagttcctcggcaaatagcaatgtatctttctcgtgaattaacagatgccagtttgccaaaaattggtcaagaatttgggggaaaagatcataccactgtcatgcatgcttatgataaaatcgacaagcagatgaaacttgattctgatatcaaaactgctgtctttgacctaaagcaaattttggagcactaaaagttatccactgtggaaaaataaacaagttttacacaagtttttaaccgtaacaagtccgttattttaggcttcttatgagttttcaacagaactcacaggccctactactactaattaattatataattactaataaagagaaatcacacagctattcttgggaggaaaaacatgaagtttacaattaatcgcaatctgtttatcgaaaacctcaataatgtaatgcgggccatctcatcaagagctactattccaattcttagtggaattaagttagacttaacagaagataaacttacgttaacgggtagtgatacagatatttcaattgaaattcaaattccagtcaatgatgatttaaatgtggaatctacaggttctattgttttaccagctagattctttagtgaaatcgtaaaaaaattacctggtaaagacttctcatttgaagtaaaagaaagttttcaaactcagatcatatctgaaaatagtgaatttacaattaatggtttagatgctaataactatccacgtttaccagaaattccagatgctgcttcattcactatttctggtaaaactttccgtgaaatcattaatgaaacgcaatttgctacttccaatgatcaaacacgagcaattttaactggggtacgtttcttctttagtccagataaaattaaagctgtcgcaactgattcccaccgtttatctcaaagaacaattgctttagaaaacggacctcaagctgaaactgatttgattattcctggtaaaagtttgcaggaattagctagaatcattggtgaagctgatccagaagttaaagtttgcccaggtgataaccaagctttatttgtaattggcaacttgtccttctattcacgtcttttggacggaaattatccagacactgatcgcttgattccgactgaaaagaccactagtgttgaatttgacatttccgaattatctagtgcccttgaacgtgccagtttgttaactcatgctggccgtaacaacgtggttactttgactttggatatagaaaatcaatcagctaagttatcaggtaaatctgcggaaattggtaatgttgaagaagatgttagcttcagaaatcttgaaggaaacaatttagagatttccttcaaccctgactatatgcgtgatgcgttaagagcttcagtaacagattctgtaattatgagttttactaagccacttcgtccatttatcattaatccagataaagaagacattgaatttgtgcaattaattacgccagttagaacatattaatcaagtacacaatatttaggtcataaaaagtcgtcaaataaggcgactttttattttgcttttaaacgaaaacgcaaaatattggcgtatatttatttttttaccgtgctagtgtgattaggttattttgaaaaaaagctctgaaaaggcttataagagcgatttagtttgttatttgtgttgaaaactaatataattatataggtataaagcgtattgaaggtgagcattattaagtattttaaagttgacggcgatcatattactttggggcaatttctgaaggaagagagcattatttcatcaggtggacaagctaaatggtacttaaaagataatccagtaactttaaatggtgaacttgaagatcgaagaggcaaaaagatgcatgttggtgatcacgtagtggttaatggccaagaatatgagtttcggtagggaagtcaatgtatcttgatcattttactgtacagaattttcgtaatttaaaaaagcttgacgtaaattttgattcaaacgtcaatatttttattggcaaaaatgctcagggcaagaccaatttgctagaggcaatctattttttagcattaacacgttcacataggaccaataatgataaagatttaattggtttcggcggtgagtttaccaatttacttgggcatgtacataaaagccaagtggatcttgatttacgtgttttgatcacccaaaaaggtaaaaaagtatggattaatcgagttgagcaggcgaagttgtctaaatacgtaggtcagctgaatgcgattttattttcaccggaagacctcgagttgatcaagggtgcaccagcactgcggcggagatttatggatcaagaatttggtcaaataaatgcagagtatttatacttcgcaagtaagtatcggcaagttttaattcaaaagaataattatctgaagcagctagctaaaggtaaggcaaaggatcaggtctttttagatgtactttcagatcaactagctggtatcgccgctgaagttgtctttcgacgatttaaatttcttaagtatcttagtcactatgctagcgatgcttatgcacatattagtttgggcagtgagcagttttcaattgcttatcatccatcagtggctgacatccaagctgatgacagtacagaagaaatttatcaaaagattttagcaagttatgcacgaaataaggcaagtgaaattcgcaaggggacaactacttctgggccgcaccgtgatgatattgaatttaaacttgatggtcaaaatgcacatctttatgcttcgcaagggcagcagcgttcaattgcacttagcgtcaagctggcggaaattcaattggtgcatcaactaacagatgagtatcctttactcttgctggatgatgtaatgagcgagttagatcatggtcgacaaagtgcgctacttaattatattcatgggaaaacgcaaacctttattactacgactgacttagaggggatttcctgggaaataattaaaaagccgcgtgtgtatcacattcaatcaggcaaaattagtttggagaaggagaattaaatggctgataattcaaaagaaaatcttgaaaaggtcaaaaaatatgaaaaagaggctgacaagtataatgccagtcaaattcaggttcttggcggtctagaagctgtacgtaagcggccaggtatgtatatcggttcgactagttctcagggattgcaccacttagtgtgggaaattattgataacagtattgatgaacgacttgctggttttgcgaccaagattgaagttacgattaacgaagatggtagtgtcaccgttcaagatgatggacgtgggattcctgtagatattcaagaaaaaacaggtcgtcctgcattagagactgtatttactgtacttcacgccggtggtaaattcggcggtggtggatataaggtttctggtggtttgcacggagttggggcttcagtagttaacgctctgtccactaaacttgatgttaccgtaatgcgtgatggcaaaaagtactttatcgatttcgatcatggccgtgttaaggatgagatgaaacaaattggcacggttccacttgatgaacatgggacgattgttcacttctatccagatccagatattttcacagaaactattgtttttgatgacaagatcttgaagaacagaatccgtgaattggcctttttgaacaagggattaactttaacctttactgacaagcgtaaagacactgccgaaacagatgtgtataagtttgaaggtgggattaaggaatacgttgcctttttgaacaagggacaagaagtattatttgatgatccaatttatgttgaaagcacctataatggcattgatgttgaagtggctttgcaatatacaaatggctataagactactttgatgacttttgccaataatattcacacctatgaaggtgggatgcacgaggccggttttaagactgcgttaacacgtgtggttaatgactatgcacataagtctaagatcttgaaagataaggacgataatctttccggtgaagacattcgtgaaggaatgacagctattgtctcagttaagcaccctagtccgcaatttgaaggtcagactaagaccaagttaggtaattcggatgctagaactgctgtagataaggctttttcagaaacctttagtcgtttcttgatggaaaatccttcagttgggcgcaagattgtagaaaagggtcaattagccgaacgagctagaactgctgccaagcgtgcacgtgaagtaacaagaaagaaatctggtctggaaattgctaatttaccaggtaagttagccgacaatacaagtaacgatccaagtatttcagaactgtttatcgtcgagggtaactcagccggcggttctgctaagcaaggtagatcacgtttaacacaggctattttgccaatcagaggtaagattttaaatgttgaaaaagcttcgatggatcgaatcttggctaaccaagaaattagatctttattcacagctttaggaacaggctttggtgctgactttgacgtttcaaaagcacgttatcacaaattgattatcatgactgatgccgatgtcgatggtgcccacattagaaccctgctgttgaccttgttctataactatatgcgcccaatgatcgacaagggctatgtttatatcgccaagccacctctataccaagttcgtcaggggaaagtggtcagatatcttgatactgacgaagaattgcatgattacttaggtagcttgcaaccaagtcccaagcctactgtgcaacgttacaaggggttaggtgaaatggacccagagcagttgtgggaaactactatgaatccagaaaatagaagactggatcgggtaagtcctgagtatgctaaagatgctgacgcagtctttgagctcttaatgggaaatgaagtttcaccaagacgtgactttattcaaaagaatgctaaatatgttgaaaacttggatgcataggaggattagatggacgagaatcaaactcaagatcatagaattaaaaacgtcgatctaactagcatgatgcgtagttcatttttggattacgcaatgtcagttattgttgcacgtgctttacctgatgttcgtgatggcttaaagcccgtacaacgtcgtattctttacggtatgagcgagttgggtgtaacgcctgataaaccatacaagaagagtgccagaattgttggggaagttatgggtaagtttcacccccatggtgattcctcaatctatcttgctatggcacacatggcacaagatttctcataccgttacatgttagtcgatggtcacggtaacttcggttctgtcgatggtgatgagccagccgcaatgcgttataccgaagcaagaatgagtaaaattgctgtggaaatgttgcgcgatatcaacaaaaacaccattgattggcaaagaaactatgatgataccgaaaatgaaccggttgtcttacctgctagaattcctaacttgcttgttaacggtgctaacgggattgccgttgggatgacaacaaatatcccgccacataacttgactgaagttattagtggtttgcacatgttaatgaaaaatcctgatgctacaaccaaggacttgatgaaagttatcccaggtcccgattttccaactggcggaattattatgggacgtggtggtatctaccgtgcttatgagagtggtaagggtaacattgttgttcgcgccaaaaccaatattgagactgaaaagagcggccgcgagcgcataattgtgagcgaaattccatttatggtaaacaaggctgaattggtgaagaaaattgctgatttggctcgagaaaagactatcgatggaattactggtgtgcgtgatgaatcagaccagacagggatgcggattaccattgatattcgccgtgatgctagtgctagcgttgttttgaataatttattcaagcaaactcaaatgcaggctaactttggtatgaatatggtggctattgttgatggtgcgccacactttttaaccttgaagcaaatgctgcaatattacttggatcaccaagaagatgttgtaactcgcagaacaagattcgagttagctaaggcagaggcaagagcccacatccttgaagggttaagaatcgctctggacaatattgatgaaattgtccacattatccgcaatagtcaatcaagtgacattgctaaagcaactttgattagccgctttggccttgatgataagcaatctcaggctatcttagacatgcgtttggttcgcttgactggcttggagcgcgataaggtagaagctgaatacaaggaattacaagctaaaattgctgactacaaagatattttgtctaagcctgagagaattgaccaaattatctatgacgaattgcttgatattcaaaaacgattcggtgataagcgaagaaccgaaattggtgctagcgaagtcgtttcaattgaagatgaagatttgattgaaaagcaaaatattctgttgacggttacccataacggctatattaagagaatgccaattcaggaatttaagactcaaaaccgtggtggtaaaggtatcaagggaatgggtgtacaagatggcgactttattgagcatttgatttactcaagtacgcacgatctgctcttgttctttactaatgctggtaaggtttactccaagaaagcctatgagattcctgaatacggccgcgcagctaaaggattgccagtagtcaacttattgcaattggaaaagggcgaaaaggtccaaactgtaattaatattccggaaggtgctgacgataattacttattctttgttactaagatgggaactgtaaagcgtacacacgttagcgaattttctaatattagaaacagtggtttaattgccttaactttgaaagatggcgatgaattaagcaatgttttgactactgatggtaagcaaaacatcttaatcgggactcacttgggctacgctgttaccttcaatgaaggcgatgttcgggcaatgggtcgaactgctgctggtgttcgcggaattaacttgcgtgagcatgactatgttgttggttcaggtattttaggtgctgatgaccaagtcttggtaatttctgaaaagggttatggtaaacggactccagcttcagaatatccagttaaaggccgtggcggtaaaggtattaagactgccaatattactgagaagaatggtccattagctggtgtaacaatcattaactcaaataatgatgtgatggtaattactactgacggaattatgattcggtttagaattgatgatgtttcgcaaactggccgtagcaccatgggtgttcgcttgattaaagttagcgatgatagtcaggttgcaagtttaaccgttgttccaactgaggaagaacaagatcaaactggtgacgatgacgactcaaaaaatggataattaattaaaaaaacaaaaaatttgaacttttaaaaaaattatcaaacttttttgcgtaataaataatgagcagtaaaaaatctgctaggatcacgtgaaaacagtttggtaattttttatttatatgctaaaattagaaattgcgagtaatattccattactccttgttcttgattttagcaagaaccatatagtccagaaggaggtgcaatagtcatggcaactacaaagtacgaagtaacttacatcatcaagccagatgttgacgaagacaacaagaaggctcttgtagaaaactacgacaaggttatcgctgataacggtggtactatggtagaatccaaagactggggcaagcgtcgtttcgcatatgaaattgataagtatcgtgaaggtacttaccacattatgactttcactgctgacaacgctgacgcagttaacgaatttagccgtttgtcaaagattgacaacgctatcttacgttcaatgaccgttaagttagataagtaattttaatttattatccgttatgtgatttaggaaaggaaggtacatgagtatgattaatagagttgtacttgttggccgtttaacacgtgatcctgaattacgtactactgggagtggaatctcggttgctacgtttactcttgctgttgaccgtcaatttacaaatagccaaggtgagagaggcgcagatttcgtcagctgtgtaatttggagaaagtcagcagaaaacttctgcaactttacttcaaagggttcattagttggaattgatggccgaattcaaaccagaagttatgataataaagatgggcaaagggtatatgtaaccgaagttgttgttgataacttcgcattgctcgaatcacgcaaggatcgtgaagcccgcggtcaaaatggtggttatacaccaaatagtggaaatgctagcagtcaacctgctaacaatttcccaaataatggcggatcacaaggtaattcacagactaataacaatcaaaataattcacaagatccatttagtggctcaggtgatacgattgatatttctgatgacgatctaccattttaaactaaattaaagaaaggattctagaacatggctcaacaaagaagaggcggccgtcgtcgtcgtaaggttgactacatcgcagctaaccacatcgactacgttgactacaaagatgtcgatctgttgaaacgttttatctcagaaagaggtaagattttaccacgtcgtgttactggcactagtgctaagaaccaacgtaaagtagctaatgcaattaagagagctcgtatcatgggcttgttaccattcgttgctgaagactaatttagatcgaaataaaccaaaaggacaggacacaaggttctgtccttttttcgtataataattaaaaaaattctctcttcgtattgtacctactgttttcaatcatgagccggaataaggtataattaacactgatatactatatctattaggaaggatcttcatgaaggattttttacgtaagctagagttgcctgaatttattaaggattcacggctgacagcttctataatcattgcactttctctttcattattgggaagcattattgcgatgattatgaatccattgtttggtttggcaatgcttttagtctttattttgaccgttgcctttgccatctatgggacctatattttagcgggtaatgcaaatagctttgcggttaatttgtcttaccggataaagcgtagtgaacaagaagcaatgattaagatgccgttgggaattttgctttatgattcggatcaccaaattcagtgggttaatccatatctgcaattatatttaaagagtacagatttagtggggcacacaattgaatcagttgaccctgatctgaataagctacttaatgaagcaattgaggcaaaaacagcagaaaatcatctggttgattgggatggtcaccgatttgaaatggtggtccaaaataatttaggcgtaatatatttattggatattacgcgctatgccaaaattgaagataaatataaagctgaacgattggcgattggtcaaattttcatcgataattatgatgagctaagtgaagcaatgcatgatcaagaattgaccagcatgagttcatatgtgcaaaatacattgagtgattatgcgaaaaagtttaacgcatatttaaaacggattgatgaagaccatttcttgatcttgatccatatgcaagaattagctgagatggagaaggacaaattctctgttttagataaggtgcgtcaagaaacgagtagaaacaatacgccacttactttatctatgggaattgcttttgggagtgattctttgtctgaaattgccaaccaggctcaatctaacttggatttggccctaggtcgaggcggagaccaggttgtcttacgtcaacccggtaaagacgcccgcttttatggcggtaagtctaatccgatggaaaagcggactagagttagagcaagaatggtttcacaagcaattagtgaactatttaaagatgccgatcaagtttttgttgttggtcatcagcgtcctgacatggactcagtcggtagtgggattggcgtagtaaaattagctcgtcttcacggagttaaagctaattttgttttagatactaataagacaaactatgatgttggtcgcttggtcaccttaatgcaacagaaaaatcaggataaggatatttttattaaccctgatgtagctttagctcaagttactgacaagtcaatgttggtaatggttgatcattcgaagtattcaattacttactcacggtcactttatgatcgtttgaagaatcgaatcatcgttattgatcaccatagacgaggcgaggaattccctgaaaatccaatgttaacctatgttgaaccatatgcttcttcggcttgtgaattggtcactgaaatgattgaatatcagcagccagctaacggtaagcgagttttgaccgatattgaagctacagcaatgttagccgggattgtggtcgactccaaggaattctcgttgagaacaggaactagaaccttcgatgcggctagttacttacgttcaatcggggctgactcagcagttgtaagcatgctcttgaaagaggacattgatagtttcctcgaacggacgcatttagtagccactttgaagatggtgaagccacatatggccgtattatgtggacctgatgataagattatagatccgatcattacagcgcaggcggctgatactgcacttgatttggaaaatgtgggtgctagtttcgcaattacgcggcgcagtgataatacgattggtatttcagctagatcaatgggtaagatcaacgttcaaattattatggaaaaattgggcggtggtggacatctttctaatgcggcaacacagattaaagatgttactattgaagaagcaaaacaaaaattgcttgatgcaattgatgaatatgaaaaagaaaatgattaggaaggacaaatatgaaagttatttttactcaagatgttagaggtcgaggtaagcgtggacaagttaaggacgtacctgatggatacgcacaaaattacttgattaagcgaggcttggctaaagaagctactaaaggtaacatgaataccttgaagcgtgtagaagctaatgaaaaggctgcttatgaagcagaaaaggccgaagcagaaaagatcaaggcagaacttgaaaaagacgataccgttgttaacttcaaatctaaggctggtactgactcacgtttgtttggttcaatctcaagtaagaagattgtggaaggccttgaaaagcaatacggtatcaaggttgataaacgcaagcttaacttgccagaaccaattaagactttgggctatactaatgttcatgccaaattatttaagggtgtagaagctactattcgcgttcacgttactgaacaagactaataaaaagtggttgtgattgatggataatatcgtttctcaacaaattccgcatgatcgcgatgccgaaagggcagttctgggtgcgatttttatcgatcctgaagcaattgcggatgctagtgcggtagttcagcctgaagatttctatgagcgggctaatcaaattgtctttcaagcgatgttggacttgtctgatcgcggggatgcaattgatacgctgaccttgcaggatgaattaaacaaaagaaatcagttagaagatattggtggtatcggttatgtttctgaattagcgatggccacaccgacagcagcgcatgttacctattatgccaaaattgtgcataggaaggcgctgcttcgtcgtttaatctctgctagtcagaagattatctctaatgcaatcgatggctctgacgatgtaacagacattctagatgacgctgaaagtgaaatcatgaatgtctcgtcagagaatagcacaggcggctttaggaccattaaagagatcgttaattcagcgattaatgatattaataatattccggatgacggaaatatggttactggcttgccgactggttttgcggaattagataagatgacaactggttttcacgatgatgaattgatcattgtagctgctcgtcctggtgtgggtaagacttcatttgccttaaatattgcgcaaaatgtagggctacacactgaaaaaagtgtagctatgttctcactagaaatgagtggagagcaactggttcagaggatgttagcttctgaaggactgattaattcacagcacttgagaactggccagcttgatgaagaagaatggcgtaaattggtagtggcttctgggtcactagcaggtgcgcaaatctttatcgatgatacgcccggaatcaagatgagtgaaattcgtgctaaatcacggcgattagctaaggaaaagggcaatcttggtcttattgtaattgactacttgcagctgattgaagggccacgcagtgaatcacggcaacaagaagtttctgctatttcaagacagttaaaaaagctagctaaagagttgcacgtgcctgttattgccctttcgcagttatcacggtcagttgaacaaagacaagataaacggcctgtattatctgatattcgtgaatctgggtcaattgaacaggatgccgatattgtttctttcttgtatcgtgacgattattatcgtgatgaaccagatgatggtgaaagtagcggtagtcaagatgaagttggcgcagaagacgataatggtgaagtagaagtcatcattgaaaagaaccgttccggtagccgggggacggttaagctaatgttttcaaagccattcaaccgtttttcaaatttggattatgcgcatgatcctaatggtaattagaaaaagcactcgatgagtgctttttctatgtttgaatataatacgaataatatttacatttataatggaaattgtttatatttggtgttgaaatgataccataagtttgctataactattactgaaaagagtaataacgaatatactcatggaggaatagcaaatttatgaaatttaagaagattttggttggtgcttgcgccgtcttggcagctgtctcattagctgcttgctcaaatggtaagaagagttcatcttcatccagtgaacctaaggaattaaacgttgagtttgtgccaagtactcaagccaacaagatggaggctaaggctaagcctttaggtacgcttttacaaaagcaattgcatatcccagttcatgtgaccgtttctaccgactatagcggtctagttgaagcaatgtcatctaagaaagtagacgtcggcttcatgccaccatattcttacatattagctcataaaaagggaattgctgatgttttattgcaagccgaacgttacggctatgatgaaccatccggtaagatgaatcataccttaatgcataagtatcgtggtatgatcgtggttaagaagggctcaaagatcaaatcttggaaagacttaaagggtaaaaagattgcgattggcgatcctagttcttcatcgggctatgtttatccagttgcggaactttacaaaaagggtttgaatgtaaccaaggactgcaaattagttaatgttaagggtgacgatcaagaagtgttatccgttttgaatggggatgttgatgccgcattcgtcttctcagatgcacgtaatattgccgctaaggatgacaagaaagcaatgaccgatgttgtgccaatctactttaccaagtggattccaaacgatactattgcggttagaaaagatatgcctaaaaaattcagagttaagttagctaaggctttcaagaatattgctaagtctaagaagggtaagcaaattatcgaaagcatttataaccattatggttacgttgaagctaaggattctgactttgatggcttacgtcaataccaaaagatcgttaacaaagctactggtggcagtaactaaaatagaataatttaattgaaagggctcaccattacgggtgagttctttttgtttctatataatatatcagttaaaatagacataaaagaaatgaagaaagaagaaaaatatgaaaattgcggttttgactgatagctcggcttatttaactaaagaacaacaagaaaaatatcaaatcgatgttttgccaattccaattatttggggcaaaaaagtatatcatgacttagtcgatattggttatgaagaattttatcaaaaactaaatacagcaaaagagctgccaactacttcgcagccttcaatcggtgatcttaagcagaagattgatgaatacgtggcagcaggctacacggatgttattgtaattactctttcaagtgggatttctagctatttctcaaccgttcagagtgttgcggcagaagaagaccgaatcaaggttcatccattcgatagtaaaattacctgtgctggtgaggcggattatgctatgttggcaggccgtttaatcgaggctggagcggatattgatttgatcatgcatgatcttaaggacttgcaaaaaacaatggatgtgcgcttcatggtggacgatttgagccatttaaagcggactggacgtttatctaatgcggctagctttgttggtacgttgttcaagattaagccgattttatcgatggatgtgcaaaatgaaggccatatttcagcgattgcgaaagagcgtcaatataaacgtgcatacaagcatgtgcaaaatgattttgataatttgactaaaaatatgccgtataagattcaggacacaatttttgattcacttgatcctgagaaaaagcaagagtggctggaagattaccaagcaaagtttcctaagtataagttcgataccagcattatcggaccagttgttggcgtgcacgtgggacaaggaacaatgtcgatgatttggtgccgtgatttggatacttattttgatgaaaatggtcagccaatcaagggaattgagtcacaagcagtagtggatccagagtaagcataataccgatatggcaaaaaaatgagaggcactattgattttttaatatcattgctatattattattaataatttaatatggcgatgaatagggatgatcagagtgtcaatcagttctttttttaaaaagttaatagccaaaaataaactcttgtttttagctatggtgattactagtgcttttgcttctttagatggcgtcatttctccttatgttattgggaaaattactaatacactttctcagaaacattttagtgagataccgaaaatcttgttactgtatctgttgatgatgctttttctgaatgttagcttttatctatggcaattttgttggggaaaaattaccaaatcaagtaatgaattattgagatctacagcttttaatacttttattgcttcccctagtgaaaagaaaatcactaataccctgaattttatcaatgttaatgttaaacaaattgaaaatcaatgtattgattcaacaattatgcttgtttactgcgttgagcaagccatcgtttcattagtttatattttaagtattaatggcattgcagcaatggttttcttagtttgtgggttaattccatcagttattccacgtttaactcgtaattgggttcagacaggaactaaaaagtggaatagcagttatgaaaactataatcaaaaaacaagtgatgctgtgcatggtttcgatactatcagacatgcaaatggtgataatagattcaaaatatttgtccaaaaagcattaatgggagaagaaaagaagtattttttgatgaattttcggcgtaatacttctaattttttagcccaggtctcttattcattatcaatggttatttctttggctgttggtacattctttgtaattaatggtcaaattctagtaggtggtttgatttctctatttttagcatcagatcgtttaactagtccaattatttcgattgttaatattgcaaatcaattgacctctgttagtcctctgctaaaaaataaagctttacaaaaatctaaaaagcaagaatttaataatttagacttcaccaaattaccaaaccaagagaaaataatttttgatcactgcaatttagggtattctaataaagctattttgaagaatattaatttgacagtttctaaaggcaataaagtattgatcatcggtcgttctggtattggtaaatccactctgttcaagacattgcttaatgaaattccattgctaaagggcaaaatactggtggatgatagtcttaaccaagctaatttctataccaattttggtattgttagtcaggatacttatatattcgctgaatctttgcgctttaatttaacgcttggaaaagattttcctactcagcaagtaataaatgttttgaaaactgttaaattaagttatttagctaatgaaaaaagcttagacatgcagatcggggagaagggattatcactttcgggtggagaaaaacgaaaactggaaattgcacgagctttattgaatcaaaaatcgattttacttgttgacgaaggactatctggacttgatgaagaaagcaataaacaaatttttgcacttcttcaaagtcttccgcagacagtaattgaaattgaacatgctgttagtccagaagagaaaaatcaatttaatcaaattattgatctaggagctcagtattgatttttttataaataaacaaaaacaattacatacgtatgaaagcctttacacataaagacttttttatttataatattagcagcacgaaaactttttggagaaaaacttacatacagaaaaggatgagaatatggcagaaaagaaatatgtcggcagtatcgaagcaggcggtactaaatttatcgtagctgtgcaagatgttgaaacaggtaaggaagtagcgcgtgatcgtattcctaccactactaacaaggagactttacaaaagactgctgagtttttcaaaaagcaccccgttgatgcattaggaattggtacttttggtccaattgatatcaatcctaactctcggacttatggttacattttggacacgcctaagccaggttggtcaggtacggacgtaaagggcttttttgaaaaggaattaggtattccggttgccatgacaactgatgttaatgcatcatgttatggtgaatatgttgctcgcggccgcaatgattctaagagttacttctacgcaacggttggtactggcgttggcgctggaattgtacaagcaggtaagttgctcggccttaataatcacccagaaatgggccacatgttggttcgtcgttatcctggtgatgattatgagggtcactgtccattccataatgatgcttgtgtcgaaggcatgtctgctggtccaagtcttgagggcagaactggtatccctggtgaaaaattgtctcgcgataacaaggtcttcacttattctgcgtattacattgctcaaatgctcttcaatgtttacatggctgctcgtccagatgtaatgattgttggcggttcagttttaaatgaagatgatttggttaaggtaagaaagttctttgatgaatttaacaacaattacgttgccacacccgatttgaatgaattaattgtgcgtcctgctgtggctcacaacgggtctgcaactcttggcgattttgaattagctaagaatttgctcaaataaaaaagcatagataaattgaataagcaataaaaaggctcaactcgttaagaaagacgtaaggcgagccttttttgacgtaatttgacctaaatgcgcgtaatattaattctagaaacgtaaccggtttattaagaaaggagcccaactatgaacaaatcagatagtggcttaaaagacaaagttatcggtaaagtgaaagaagtcgaaggtaaaattaccggcgataaatcacgcgaagtccaaggaaaagctcaacaagccaagggcaaagttaaggacaaagccaaaaaattaaaagatgatctggaaaaagaccatcaaatagatgaagattgttaaagactcaggtcgactagcaatagctaaacagaaagcaaataggtgatcctatgttatcatggatctgggttttaatcgttggcgctataataggtctaatagctggtttcataaccggcaagggtggatcaatgggatttctagctaatttaatagcagggctggttggttcaaccttaggccaagcaatctttggttcgtgggggccgcaaatggctgggatggcaatcgtaccatcaatattgggagccgtcatcttggtactagtggtttcctttgtactagggatgcttagaaaaactgaataaaaatagaataagagaaaaaagacatgctgggcatgtctttttttgtgtttcatgtgaaactattttagcttttttcgttcattttctttctcagctaaaaaacgttgcttaatttcttcaggcaaaagactagggaccgtcttgtcataaaattcaaagaatatgggtgccttgttagagtcattgctcttgggatataaggcaaagtcactttcgctaaacggtaagctgatattaccacgtaaagcattgataatctcaccgaacatatgcaaaacataacggcgcgtctcaggctctaatgacatgattacgcgactgaaacggacagtgcctaataatttatgggcagtaatttgaaaaatatcggtaatatttaattcatcaaatgcttggaaaagagcatcccataatgcaccacgttgcttttcagggatgctgtggttaaagtcgatgaagaaatgccgcaaagaacgtgcacctgaagtaagtccttctgctagaacaaaactatcacggccaacagaccaacggcgtggatcatgttgctggaccatcggtgcagtgcttttgacgattaaaacgtgttcaggatgatcaagcatggtgccaatgattgaagcttctgggaggtaggtcttcatcttgggtaatgcacgtacaaagccaggtgctttccagacttggtggaaaaagccggggccgtcaaagctaaagaccttgataatgcggtcttgcaattttggctcggctacgcttaaagcatattcagcgtaattgccgcccttagaatgccctgctaaataaattttgtcatggggaaaggcggcagccatttctttgagataattggcagcaacatcttgaccataaactttgggcatgtagttcatattcatgtcttcgttccagccgatgattgagttgtcggttccgcggtaaacgatgataattgtattatcgtttaggcgaaaagtagccgcggtaaattgaagtggataaggatccttttccagccgattagtccaattaaggattttgatgtcgcctagacgaggtgatttaggtaaaagaagaatttgatcgccagctaaatctttcatttgaacttgaaatgaaggaaggacgtgtaatttttctgcgacttcacttaaggtatgttccttagcagatttgtcgacgggtaagtagatgattgaggcgaagagggatgcgtccacgctattaaaaggccgttctttaaaagaaagatctccccgccaacgtaaataatcaagtgttccagccataatctcatcctttcattaattaggcaatattactattttactaaattgtcgcgccaaaataaaaatctcaagctaatgcttgagatttaaaatgattttacataccaccacgggtatagctaatgcgagtaatatcaggatatttacgtagattcatgacaatagagttctcatcaatcttattattaatgattccgtcaacgtataaaacaatacggttatcactcacgtcgagaattttaacagtaacattttcgacgtgattatctgctagttcttgcctgattttagacaaaatgtggtgctggttaatagccacaatttgaatgttaaaacgaacatgtggcgttattttgttgataatgacatcatcgtgaaagatcatttgaatgataaacaatagggcggttgataggataccgatgaaatacatgccagcaccaacagccatcccgatggcggcagttgcccaaactccagcggcagtagttaagcctgagacctgttcttttctaactaggattgtacccgcaccaatgaaggaaattcctgtaacgatctgagccgcaattcttgatggatctagtgcaatgtcatgcatgcttaatagatcggtaaatccatatttagatacgatcatgaataaagcagaagcaatcgcaactacgatatgagttctcacacccgcgctttttctctgaatcgcccgctcatagccgattaatgcgccacaaaaagctgcgacaacaattctaagtagccaatctaattcggttgtaattggagctaaagtttgcattatttagtcctcatcctttgtataatcaacaattattatcatttctattttaacgtaaatgcagaaaaattatagtctggggaatttttttgaacttttttcaaaaaaagacttgcacagtttccatctatatggtttaataaatactgttgtcgggtaagacaacgaagagttgctgacttagctcagttggcagagcacctcactagtaatgaggaggtcggaggttcgaaccctctagtcagcattagaaatacgtttaagtctttcaaataagttcaatgaagcttgatttgaaaggcttttttgctactttgaactagaatgaaattctttgaaataataaggatttatttgaaattaacacaattcaaacacacagatacgattcatgtgttaagaatgtgcttgaaggaaaattaagagtactaaatatagtgatttaacaggcgttggagcctgttttttttgtgtttggttagggcattttgtttaaattaaattcagtggatttttgtgcaaaaaaatagccatattgtagggttatacatattgactattttctattattaaaattatttcaattcagccacaaacctaattccttgataagaaggaaacttgtaattatcccatgaaaaataagtgtctggaaattagttctttctatttaatctcaatgctatttcaagttagctattaatctgtatcctaagaatccattgctagattttggattccaagcaatacctacaccaatttttgtatattgaccagataaaagaatgtctctatgtccccaattagatcctgcatcatgataaatgaaattatttaagcaaatttttgcttgtgtagatggggtatcagtattatcaactgcacctccagcaagcacttctgcgtattgagtgcggcttccgtctggccttgtatggctaaaacttgtatttgcttcggtagctctagtccttgcatattcttgcagagaagtatcaagtgttaaagaatttagtccctttgattgacgtaattgatttaattgcgcaataaattcttgttctaatttggtagcaaaatcagaatccttaatgtttgtatattcattattgggttttgtatttgtggtttcattatgcttaataaaattgcttgaattagcactttgagtatttgtttcatcggatgtacttttagtaatagcagatgttttagaagtgtcaggttctgaaactttgtgagttaattctgaactaatccatttgttagttccaactttgtaccatgttttaccacggctatccttcttttctgcataaacatataagtattttttaccatgaattattttagtgcggtaagcttttacacttctgcctttcttgagtgttcttgctcctttaatacgcttgcctttatagttgtaaacataagcattgtgagtaagttttacgctgctagtgcttgcttctactacattggcttgttcgttgccagcaacaactgtagctgaaagcaatagagctgatgaaagcgtaatggttgatagtaatttagtaacgtttttcttttgtaacatggtagttacctcctatattccttatttcagattagcaataagactgtaccctaaaaatccgttacttaatacgggatcgaaagcaaatccaactccaatttttgtatattgactagataaaagaatgtctctatgtccccaattagatcctgcatcatgatagatgaagcttctcaattgttggctggcttcttgctctggtgtacttgtgtcgttaactgttcctcctgcaagtacttctgcatattgagttctacttccatcgggtctaatatggtcaaatttagtattggcttcattagctctggttactgcataagattgaagtgtattatctatgcttaatggcgctaacccattggatctacgtaattcatttaattgagttacaaaagattgttcagtttcatttgcaaagtttgagtttatgatatttgaatacgtctgttcatttgaagccgaattattatcttgttgagtaatactttgtgaatctgctttttgacagtttttggaactatttctttttgtataaaatttatcagtgtcagtagcaagtatccatttgttatcaccaattttataccaaattttatcgttaactttttcttgagcataaacttttacagattgtccgactccaatgtattcgccagtaggtgattgattgggagctttatatgtttcacccaatccattatctgtaatttttgcagtgaacaaataatttgattttgtgttttgcacatttgcgagcctgatatagtgatgactaccaatgtataaatattttgtgccacgtattttcttagtgcgataggcttttacatatttgccttttttgagtaatttaacacctctaatacggttgcctttgtagttatagacataagcattatgcgtaagtcttacatttttagtgcttgcttccactacattagcttgttcgttacttgtaacaactgtagctgaaagcaatagagtggatgaaagtgtaatggtcgatagtaatttaacaacttttttcttttgtaacatattagttacctcctacggatattcattatttcaatttctaaattaatgatacatgatgtgaaaatgcatttcactgctgtttttctttgctggaattatatttatctctcgtaaatttataaaaaagtaaaagattgaaaagttaggtgcatcatttaatacaaaatataaactgaaatagattctcgttgaatttggaaactgtcaaatcttttgtgtaaatagttctttctcgtaaattgattttttaattatttatttaatcaaagtaggattctaaggtgtcctgaacctgaccaaagcctttatgaattcgattgaaataacggtcattgtagctcattgcctgaatgccaataaaagcatcaagcgactgttcagttggaaactctgccttaggcttagctttgcgcttgatcacattgttaaatgattcaatcatgttagtcgaataaattgaagctctgatctgcttgggatagttataaaagaccagcagatctggttctatgtctttcaagcttctgataacatggctgtaaaccttgccccatttggtatagaagtcatgcaggacagctgtggcttcttctttgtttgtctgttgatgcacctgtttgaattcgttcatgatcttttcacgatcgtcgacgcgtactttagcgcagatattgcgcatgacatgaaccaaacagcgttgaaaatgagctttaggataagtcctggccaaggctgttttcatgccaacaacaccatcagaaagaaagagttcaacttgcttcaagcctctggacttcatgttttgaagcatctctgtccagacttcaatgttctcactaggagcaatgcagtagtcaatgacttccttatgtccattaggtttaatgccaatggcaatatagactgcttcacgctcaaacgtttctcggcgcaaaggaaggtatgtcgcatccaaatagacgcagaaaaacttgtcgcttagcttgcgtttgtggtaagcctcaacctttggaatcatctgcttggaaatatttgatacctgagctggactgtaatggctgccatacatcttttcaattagatcggctatttccctggtggtcacgcccttggagtaaagcttgataatcatgctttccaagatatccgagtgctgcttgtagtcaggcagcgtgtgctgatgaaattgaccgttgcgatcccggggcacttgcacttcaattgggccaaattgcgtatcaactttgcggaaataagcaccatttctagagttgccagtattccagccatttctggcatagggatcatagcccagaaaggcagtcaattcagcttctaacaagttattaacagcctgttgtagctctttgcgcaataaatcatttattttgtctggattgaatagagcttgagcaaaatctttggtaaaatcattcatgaaggagttcttctttctgtatgtgtttttttgttcaaaccaatcatacgagaaaggaactcctttttctaatgtttaaagaaataaatttaaggaatcattcatccttacacaaactattttacagtctcttaatttgacaagcaatatacagaaattatcaataaaaagtacgttttgctataccttttcataaacctgactacaatgagagttgaagaaggcgtttttgtatgacaaaagaatatgaaaaagaagtcaaagaagcagaaagcgtattggaggaccaaaagttaactgatagtgagatttcacaagaattgatttccaaagataatccaactgaaaatgtaaaaccatctgagattgatttcttgcgtaaaaagccaaatttgacaacgcaaattgatttcactttgttagctgatcttgctgggttatccaaggaagctaaggcagaagcggctgtatagataaaaattttacgtagaaaaaagaccggtttgaaccgatctttatcttataaaaatttactttaggagcgtttgtgaaacttagctactccccaactgattagatagaaagtcgaaatcaaaatgaattgaatttttaattctaaaatgaatagtggaaagtaaaataaaacggaaaacaatagaataatagcgtaaattccttcgaatgttagaaataatctgtttctttttctatttttaagtgttgctagtatcattttttcattcacaaagatccctcctaaaaattatgaaattaagaccaacttaaataaggaatagtccatcggataggaacacctaggagccaatgtccggagctgagaaaagtgttttttaacacaacggtagtaacaattgcaataactgcgagtactaccaataagattagtaatgtactttgtttaatttttgacatgattaatgcatcctcctaatattttttaaacttctattattttgctgggataatgaccggtaattgccaccacattactgtagcctcctcccttttttaatcatttagtcggtttggttaaatactactccttagtgactagaacagattaattttgtatcacatagtttacaaattatttgggccaagttttaattaaatcttgataaccatatttttgtacttcatttctaattttttgcgcttcctctttattgtttaaaaataaattctttaaatataaagcagcaatcttataaagcaaaaaatgtatggttggttttgattccatgatgtagtcaattatttttggaacatgcattaattgaagtgattttttagaaagttttctattatagcaaaccgctagataattctcgaagacacgcaagtatctttcttgttctaattcggagatatttttattgcttttcatctcgttaagtagtttattgataaaaaatgcaagggtatcttgttcccagagcggcattgtattagtaaaaagtcgcagtaattcaggattagtcatccagttttgtccttcgttaaattcaatgaatagatctttttttattttgggatcgatttgatttaatttattttttaaatatgctacagaaatcatagctcttaattttaaaatcttagagtgagattgtgacagaatttcttgatagcatgattcaatttcatcaatttttcctacattgaaggcttgttccattttattatttaaatctgattcaatctttttttgctttgaagtataggttgctcgcaataattggtaaaagtaagtaatatcaacatcatgttcaaaaagaatcgcggctaatttatctgcactaattctgctttttcccgcttctactttcgcataaaaaggccgagtaacaatgttagcagccatttctttttgagtgaggtctagattttgtctaatttttcgtagtgcttgtccaatagtcataaaaaatcctttactctaaaatattttcttctctacgatatatgattattataaatgatgaaaatataagcggataaattaaagagaactatggatatcggaacggcattaagacatttgagagatgatctaggtttgacacaaaagcaaatgattcaggggacgaaaataactgttagtcactattctaaattagagaagggacaaaacaggatatttatcgaaaacctagtcgagatattgaagcaacgaaatatttctttatcatattttgttgatcactatcttaatgatgaaaatagtgaaaaagaagtaaattattcagaaatattaaatattgctttttacgaaaaagataagatcgctgctgaagaaataaaacgacaaattttttcagataagagttctagcaatgaattgagagatagagcaacattaattgtggatatgatagacaaccagggacagagtaatgttgatgctcgaatcattaattctattttcaaacatgacaactggactcagtatgacgaggcaataatattattgggtaatattattagaactagtaatgtattaaatatgagtcctttggtattgactctaattagaaaatataaagatctagataaagaaaaaatcgaaaaacaaagaaggttagcaacggttggaattaattatttatttaattttcgaaagttaagtaaagagtttaataaaactgtgctaaaaattataagctggattaaaacaacatcgattgttcctgagttaggcattattcgagaattaaatgcatattttttagcagtttatgaaggaaacatttctgtctcaactaatatcaaaaatgtccttaaaatatcaggttatcaaaatcttgctaatgatttacctaattaatcccctgagaggggattgagttgctgtggaatgagaagtagataaaatcatagttaattaaatatgaaagagaggcatagtaatttgattattgttagttatccagttttacctgaataactctgagttcatacagtacgaggagatataaattatgaaaaaaagattttgttaagcctaagtttagtagtattaggaaatactttgttttttaattcgagtgtagcttctgcagcgactaataatagatattccgtaaataatacaattcgtcaggcacctaatactggcgatgttcctggtggatggggcattactcctggtcatacacattggggctaagtgatagaagcgatgaatgaattttcattgctctttttattttgggatgcgaattttatgaagaaaagtaaaatcatatttttaatagagcttgtattaaatattattgctgctgtttttctagtaataaataattcattcaaaaatttattagatgtaggcgttgtatttttactacttctattgcttatttggaattttttaagaagaaaaattgagattagtttaaaactatcatggctcaatcttatgatattaccagcaatttttacttattgcttaaatactgtagctaatgttttattggtaaaatatcctgttaaaagtgttttaatagctataatttatagtttgttattcttagtttatttgcttccggtagtaattactaatgcgggattggttaagaataagtatgctagagtttttattgcaatgtattatattgtgctattactttttagcgaaaacttacatatgaatgactacttatcatcctttgtaaattggtctcactctgaaattcttaatgggttagcgttaattccaatcatattttgcttatttaaaagttgggatattcgagcaaagcttaatcttaaatttaggcgatattcaaatatacagttaatagttttattagtagctgtattctttgctgcttggtattccttctttcatagctatgtttatattgcaccaactttttcgcaattattttggaattgggacttctcggaaattatcccaactgaacgagctgttttatggagtttaggagcgattttattcgaagaaggattccggtatctattaataattgtattgcttgaagtttttaaagtgcaaaggggtcaaattgactattttcttgagtgcgctattttttggattgatacattatgccggactacttgaccaaggcccaatatttataatttcaacgcaagcaatttttgcttttggttatggctgctttttggcgacactgtacttatattctggaaaattctggttagtattgctttcacatttttcattagatcttattgcattctcgctttctgcaggtggtggcggaatactatcatggtatggcaataatgatctcttgagtaatggtttgagcatggtttttgctttagttatgacattgattatgtttttaggtaaacaaaggaaaattatgcaagaaaatgctgctagattaattaatgcatgatgcatttaagatggtcgaaagatcatcttttttatgcaataaagtgtcatatataattgacacctactataaaagttgctattattttaaaaacgtcacatataaatgacatctaactagatgaataaagaagaattcaatgaatcgagtaagagaatatcgtaagcaaaagcaaatatcacaaatggagcttgctagacgaataggggtggcaaggcaaaccattaatttgattgagaatgataagtataatccatcgttagaattatgcctaaacttggcgcatgcattaggaacggatttgaatactttgttttgggatggggatgaagcaaaatgagacgagaaagtttatggcttaagtttgtcagatattggtatggcattgatagtaaattagacgagcggcaattagcagaggttgaacgaatcggtaataatgcctatgtaatctctggtatagtggaactgatcttactggttatcacgctaattatggcattgactattaaaagtgagctggctttgtggtttttacctttggcgattgcaattatgatgctgatgatgagtgcttatacttatttgacaatgcgaaaatttaaaatattctctgtcgaaattacagcagatgaacgccccaaagcaattcgtagaatatggataaaggctataatagcgggaataattggtgcagtttttggtacattaggtagcgcgctaggagcttcttctgtgcaaaataatctagtaaatgtgcttgatttttggccacaaggtttatggctaggcgtatgttgcggtgctggtagtgcgattggaagagtgcaacgattgaaagtaattaaagaagacgaataagcgaatcgaaagtagtcgatccgctttttttgctgaaaaactatataattaaagtaacaataaaatttacagcaaggcaaaaaggatgaaaaaacaaaataagactggctcaattggcgtagtgggtgccacggccatcggtgttggtggcatgatgggagcaggcctatatacattgctcggcttggccgccaactctgctggtgtttggctgccagtatcatttctaattggaggcattgtggccgcattttcagtttattcgtattcaaagttaggaatgaagtatccagatcgaggcggtgccgctaagtttttgctaaaagaattcggagatggcctgctagctggtgggatgaacgtcttccagtatatcggctggattatcgccatggcgttatatgcgaccggatttgcggaatatgcctgccaactattgggaaaatcaagctcaggctggctaggtaaggcaatcagtatcggaattgtcatcgtggttgtggcaattaatattatgggttcaaagcaagtggcacgtgcgcaaacggcaattattgcgtttgaattgttaatcttactgtcttttgtagcggtaggtttaactaagctgcatgtgccgacaattactagttcaaatagcggcaatattgtaggtatcctatctgctgcgggtttactttacgtaacttatgaaggttttggcgtagttactaacgctgcagggagtatggtaaatcctaaaaagcagttgccacaagcgctgttcttttcattagggatcgtcatggtgatttacattgtagctagtgtagtcgtggtgatgaccttaggcgttcaaggcgcagtagctaatcaaggccacgttttggcaacggctggtaagctagtattaggcaactggggtctgttcatcacttcactgattgtctgcatcttcgttgtgattttcccattatcagctgttggtgagatggccagcctagcctttttattggtgtatgccatggttaacttaggccacttgcgcattgcaggacaaactggggccaagcgctggattttgatttgctctgttgtattgaatctagctttgtttgctttgttgtttattcagacaattctcaaccacgaaactttaacttggatttcagtaattgctttgttaattattagttttttagttgaacttgcttggcgaaaaaagaataaacgcaacctgcattgattaggaaaaaaatagtaatttatgatacaaaaagtcgacttttgttccacttattgggtacaaaagtcggctttttgtttttttcgttgtcaaaacaatatctttaatattttaattcagatatactctctttgatcaagtttgaagtgagggaaaatgaatgaaaaagttattgatcggaagcgcagtcttagctgccttattaattaaagaaaatatcgcagtaaatgcggcaatagagcaaaacgaaacaacgcctaagattgcagttactgacaaaaaagagaagccaaaagaccagtctgataatagttttgcaggtcattatgaccaagagacaaattttattacctgggaaataaggctgaatcccaagaaagaaaaatatactggtgatttgaagttggaaaatttaattccagaaggcttagttctagatccagatacgattgaagtaattaagaatgataattttattcaaaattctagtttagttaaattgaagaaaaacaaattaacagctgaatttcctgctaagaagtattcagagagcacaattttgattaagtatcgaaccaaggtggaagcagagcctaatgagcctaattatcttcgggtgagtcagtcctttactttgggcgatgatcgagttcaagaatacgagcaagaaattaaatacgatcgaagtaataagaattttaacattgaagcgccacataaatctacgtttagagatgataatcaaatttcgttaattaaaaaatctaaaagtaatgaagaacgctctgaagattggcttaaacgtctagcagagctgattattaataaaaaagaaactacttcagataaaggaggtgaaaaagttcaaggacaggtcaaagatcaaaagcagcaagcttccccagaaaatacaaacctttcacgcactccaactgtcaaaggcttgactggttttgatactaaggctaacgaggtaaaatccacagctaaaatagattctgattcagtaaaaactactctagataaagacgagattaaggacaatgcaagtactatctcgcctaagtcgcaaaaacacgatactcatgtcacactccctaaaagtgacacatcagaaactaaggcaaaattacctaaagctggtgaaactgccggtgttatgctcagcgtatttggcataattttaataattgcagggtggacagttcgaacaaaattcttaaaataatctatatttgtactaaaatacggattttcaatagccaaaatagactctttcacgtattatttagatagataaacttgtatcatgaaagagaaacaaacatgccgtacactatttcagaaattattgttttattttttacttattcagttatcggctggctttgggaaaccttttattgttcgatcaaagaccaccattatgattatcggggatttctgtttggtccttactgccccgtatatgggttcgccgttactacaattttaatttgtaccaaagacgtgcgagataacctgctccttttatttatagtagggactatcgttgccactattttcgaatttgtggctagttggctattagagacaatctttcacatgaagctttggaattattcaaaattatggggtaacattcaaggtcgagtggccccaatgatttcattattttggggcgttggtgtagttttattagtaaaatttattcagccaatcattcagaagctcattaataatgaagaaaagataactcatggctggctagctgtgggtattaccattgttatgggtattgacttagtattaacagtaatcagtgtcgagagattccatactacaactaagatgtgggatgtgcatattaaccactttattgagcgagttagaactaaagtagaaagtcatatgcctgagaaaggaaaattgcgggttggtgattggcaccactcagtgatgcagcactatgatgaattacaaccgcaacgattaagctggaatcataagcgctacttgaagagctttccaaaattaaaagttactgatgctcctaagttcatggaaattaagaaagaagtcttgaagaaagaaagctaactaacataatcttattttgtgggattgaaaaaagtcggatgatcatattaggtcatccgactttttcttatccattaattctatttggttcacgttttttactttttatttcggtgtagttatctaaaacgttggcatagcgtccaagggtgaaaaggtaatcagataatcgattgaggtattttaatacgtcatctgataattcctgttcatttaaacttaatttgaccaatataatagcaacaccatcaactcctgaaactactgaagaagaacatctgacagtaaaagatcatgtgggttcatcaactttaagaagaggattaccacaaactggtgaaaagaaatctactttgaatgcaggctttgcccttgctggcataggcttggctttgcttgcagggatgttgtttgatcctaaaaagaagcactaatactgaataagaattaagttcgttaaagatcgaatcattttgggttcgatcttttttagtaacaaaatttaaaaaatcccaccttcgtgaataattgaatactttatatatttcaatcgtccactttagtgggattgtattaattcaggatgatctttttgaatttcctgtttttgaagggcagaccaagtccatggaagagttttttagtcgcctagaaactataggcaaggcttggcataaagcctatgataccattgattccgatacagatagagtcattaagagaactaaaatggatgctcgtactacgttagacctactagaacatctatcacctgtacagttctcttgaagagaaaaagaatatcagcacgtcaccagtatggttcttagactatgatcaaaaaatttattgtactgatgatgccatcattggtcagatgcttcaaaccattaatcatgacattacccgacgcagcagtcgtagcttattacactggaaaattcttaaacaaaattgttccagaaatttttatttttgatggatgttattttttgcttggttctaagcgattttatttatcaaagttaatagttctatgttatattataagtgttataataatgtaaaaattattaagcattgaaatatagtgcattatgatacgaggagaaagatcatgttagaaagagtcccaaaatatacactaagaaaactgtcagttggcttggcctcagtgatgattggatcaggaatactgatgaactctccaaaggtacttgctgatactattaacccaaatgaaggtactagtactgctgttcaaccttctagtcaagataaagataatagtgagccaagtactcaatctggtgctactcaagatgaaaacattgattctaacgcagctgttcaagagagaagcgacaactcagttactgaaccagcaaccacaactaatgctgaagaaaaagtagtggcaacaaatacccaagatactacgcaagataaagacaagcagacaaatgcgaatgaaactacgcaaaatactaccaatgtcgacaaaaaagatactgaagtaacgccgactaacgacgcaacaacagctacaccgaagacaaccgccaaggttaacgcaccggctgcaccaacagcaatgaaggcagcagctactgctgaaacaccagatccaacggttccagataactcagctaatactgctattatcaatgacaagaatagtttggaaaaaatttggcttgaaacatctactgcgcgggcccaggtctacactaccgttaagggaactgatcaaaaaatctatgtcagttcctatgcagaattcggtaagcgacttaattcattaatttttactaatcgctttgatccaaatagtctagaattacacattgaatatcaggtgttaaaggatagggttcaaaatttcattgtaaattggggagactggctccgactagataccagtagaattggtaaagatggtctaactttcactacagatacaggtgaaaaagtagcctatacgttaacaccaggatggggggaagtacaaaacctatgatgaatggcttagtgaaggccaagatatgagtaagataaatgctcttaaaattggcaacaatttaaaggccgggactaacttcgtattaaccgttcccctaaaatatattggtagaactgatggcacaaagcaatttaacaatgttcaagttgtagattacgggcagccaaatgctaatatggtgttcgattttattgaattacatccagagcaaatcgatactccagaagctccaactactgataaagagtcagttactaccggtatctataacaatccgttagctactgctacagactggtataaaacggagcatggtgaatatgttgcatactatacagctaaagggaaagatggtaagacctatgtaactggatatgtggctgccaatggtaagtctgagtcgattatcaatgttgatcagattgatctaaataccttggaataccatatgatttaccgtaatggtgacgaagaagtagcggccggtatttcagcaagctttgctgatggtaagactctagtggttgatgctagtcgtataggtgctgatggtatccgtttgaagagtcaacagggttggtcttataacaacgggggttatagagagaatactagtgggagactctattatagttgggaagattttcttaagaaccataacggatcggtagataacctcgttggcatcaatatgaatgcatccgctttcaagccgggcgatacaattgaagtagttgttcctgttaggtatattgggaaactttctgatcaagttcaatccttagaatttaaatctgaagctagaaaagatgtttcggttaaactctacttcacaactgtgcgcaaggacttaagccaggttaagcaggtagtcttgcttccgactgagttcatgggagaacaacctggtcaatcaaactggaagctggttaaggaaattgaaaaagatatgccaaatgggtgggaggccattaaaattagtaacttcccaacctataagggatcattcaatatggattcactaccaaaaggggacttaccatcggttgtttatggctctgcgcaatactttgttgacctccaagaaattcagaaaatttttgctaaccatggttacacggtcaagtatgctaacaacaacggtaaagctcaggaaatgccattctatggatacgttaccctgccactggcccttattgatggtggtggtaaacctgttgccccatctatctggacaatccaagttcaagctgtgcctgctattattttaaataaagatcaacactatgtggcagatccgaatgctaagccatgggacaccacttcaatgattgatgagatttatgctgctgatgacgcaggacagcggaagacgcgcgatcaactagaaaagttgccaaagacggacgtggatattagttatgaataccaagctccaggggctgctacagctgctccggttgataaggtcgacttgactaaggcgggggtatacactgtcacttacagtcatacttatgctgatgggcgagtagttaaggatagtcgcaaggtttatgttgatgatgttaagcaagaaaccaaggacattactcgaacaattattgtccacgagccaaacggaactgaccaaacagttatccaaaaagcaacattgacacggaaagtaattcttgatgcaactactggggaaatcaaatctgtgggtggatggtctactgctaagtgggaaagatactcagctccagaatttaaaggttacactccagccccggctcaaattgatgaaactgctgtgaacaaggacactcaggatacaactgttgagattagctatacagctaatgagatcacaaagccagaaaccaaggacattactcgaacaattattgtccacgagccaaacggaactgaccaaaaagttatccaaaaagcaacattgacacgggaagtgattctttatgcacctactgggaaaatcaaatctgtgggtgaatggtctactgctaagtgggaaagatactcagctccagaatttgaagattacactccagccccagctcaaattgatgaaactgctgtgaacaaggacactcaggatacaactgttgagattagctatacagctaatgagatcacaaagccagaaaccaaggacattactcgaacaattattgtccacacgccaagcggaactgaccaaaaagttatccaaaaagcaacattgacacgggaagtgattctttatgcacctactgggaaaatcaaatctgtgggtgaatggtctactgctaagtgggaaagatactcagctccagaatttaaaggttacactccagccccagctcaaattgatgaaactactgtgaacgagaacactcaggatacaactgttgagattagctatacagctaatgagaccccagagcaaccagataacagcaaggacaaaggtaataatgacaacaatggtggtaacaattcagatgcgattgtgccaataaatcctagtgacaataactcaaataattcaaataatgcaccaactgacaataagaagactgatgacaccaagaaagataatactggcaagaagattacaaaggagactcctaagaaggtaaagaataataagtctaacaagaccaaatcaacgactacttctaaatctaaccagtcttcaaaggctaagcgaaccactaaatctggtacgattagtcctaaggcagtcgctttagctaatactactgctggtctagctacttcagctaaggcaaatatggaaaacggtattgccaagaacaacagccaaaattctcaaactttgccacagactggtgaaaatgaaagtaaggtagcatttgccgttgccgggttgttagcagctgctttgggcatttttggtatagctattaatcataaaaaagaaaattaattagctaagttgaataaatcatacaaaaagacgcatagaatagcaatgtcattaagttaagacattgacgaaaatcagactttatgaaccgaattattttggctctttgtcaaacaccctaaagtataaaggtagatagaaacatgacgatgtttttatctaccttttttcttatacttagattgagcttgcggttgaacccttcaaggcagccgttagaataaggcagttttgctccattaagcacagcttttaggttatgtttaaaggtcaatagtgttttgtgcattaaagtcccaatttgatcttggcagttgattaataagttgagctcatgagtattgcccgtttcaacggcttgaataaagctttgcatcaggttatatgaattctctaaggtagtgctggtattgatgccttctgtaactacttgtgcttgagttaagcagtctttgtagtgccagttatagtgaggatgaactttttcaagttcatcaaacttcttcaagtataatttccaaggagacttaagcagctgatattgccgcgatcttttatcaaaggtcttcatgacttggaacctcagcgagttgaatgagcgcgtaagcatttgaatcatgtgaaaacgatcaatgacaatctgtgcattaggaaaacaagctctaacgatatcttgatagtaaaaattaagatccatcgtgaccgttttaacgttagctctagcttggagcgagaaacgaccaaaatacttaagcagcgtcttcttgtagcgagttctaagaatctgaacgacttgatgattatcaccatccaggcagataaagtgcagctggcggtaactcatcaaaagctaaatgagctggcaaatattcgtagctgtcaataaaccggtgtgaacagttgcccagtactctttgaacagtattaattgaaatattgttttctctggcaatgctggtcatagatcgatcttcagttaaagctgacaacactttaagcttagaggcattagaaatagaacagtatttaccaattcagactgagccatagatcagcgctcacaagtgcgacatttaactcgttgcttagctaatcttataatgaccggtaagcttgcattagctgtcggatagtgaatgttggtaatcaaatggccattatgtaagagatctagggagccgcagaaaggacaagcaggttgaagcaattcagcttcatagattttatgcttttgcagtttgatcgatttatagaaatcacctttatttataagaatttgtgtggaaacgatttttattgaagaggactatgtcctcttttttgcaataaaaaatcctgttaacagcttatcatatagataagtcatcaacaggaaaaattatagagccaatattttgagattaattgataggggttgaaaagtaaattttatttgttatagaaaatatagaaaaaggattgttcaagaaattattttacgaaacctgcagtgaaccaagtgttggcactaggcttaagtgaccagccagtgaccttcttgttaacagcagtgattgagtattggttggtagttggcacaacgtatgcttcatcatacatccacttttgccacttcttgaaggcattagcacggtaagtaggattgaaggccttctctgagtcgatatcagccaaaagcttagtttgcttaggtgaaacgaaacgagcaaagttgtatggtgcagcttcattgtaaaggtcgttaggggatggttcacttgaaagtgaccaaccaccttcgaagacgtcgattcttggatcgtcagattgaacagcttgtacccagttgttgaattccattggacggccgccgacaaatttaacatccaaaccaactttcttccattgttggatgtagtttctccaaacaggttcagcggtagttgagttgtttctaacagccaagttaattactaacttcttgccgttaggttgaactctgtattcacccttcttcttgtagccggctttatccaataattcgttagccttcttcaagttgtatgggtaacccttgattgacttgtcagtataatcaccaaattgttcagggatcaaagtgttaacgcggaaggccaagccgtggtagtaacgtttagcgactgcatcaacgttcattgcataagccattgccttacgcaatgatggattgtccatcttggagttcttgttttcaacgttcttgccagacttcttatcccatttacctaccttaaagcctaagtagttgtaggataggggaaccttaccaatgaagttggtatcagtagcgttcttaacatcatcccattgggtgttaactacgccagctatgtcgaacttgtgactcttgatggcttgagtaactgagttggtaccgatgactgtcatggataccttttccaagtttggtgtaccacgccagtaatgcgggttacgttcccaagtgacagattgaccacgaacaagcttgcttacgcggaatgggccgtagaagagtggttgttttctaaccttgtcactagacatcaacttggagaatggtacgtcctttaagtaatggtaaggttcagcgtattcccagaagtaaccgttacctgattgaagcataccaggcttcatttgtttcgaccttgcggccatcttcgccatcaggcatctcaataccagaaatcttcttgctcttgccttctgaccacttaacacccttcttaacctcgatagttacggtcttggctttacggtcaagcttaaaggtagcagcacctttattgttaatcttgtattgatcgttgactgagaataacccttcttgtcctggctctgcaacttcactgtcagtggcagtatcagataattctggcaagaaaataccagtgaagggactatcagattcgatagcataatttaaagtgccaccttttttaacacttttcacaggaacagtttgactgaatttgtgatgtgtttcatctgcattattattttttgaatttttattattaccacaggcaaccaaacttaaagctgccccagaaacaagtgctaatgcaccaaaatatcgttttgctttactcattcaaaaagcacctccaaataaattaaaaatatttgagttttattctatgatattaaaatgaaaaaaacaatagaaagatgaataaaaatgtgaaaaatattatttttaaattatttttgaagctaagattagttttctttcttggctaattaggcatagaataaggaaataacagctttttatgttggaggaaaatatggatacagcctggcaaaaatttaaaaataatattccattacgtcgatttgtggtactgctattaattattgcctgcctttatgaaatacgagcaatgatgaacacagtattattaacttttatttttacttatgtgatcgtgcatttaattcatctagtgcagcggtattttcctaaaataccaacaggcctaattgttgcggtaacatatctaattatcttggcgctactttatttcgtggttaccatttatttgcccatgttagttggccaaatatctaaaatggtaaagtcagtgatggcgttttatgaatcaaatgaatcatcgcgcttagccagccatgtaacgcgttatatcagtaaaggtgagattgttacgcaggcaaaccgagttgggacttttgctctgcatacggtgaccaattttggtagtttaacaattgctacctttatgtcattgattttgagtttcttctatacgattgaattagatagaatgattgaattttcaaagttatttgttaaaagtggttactttaaatggctttttgaggatattcgctattttggtaaaaagtttaccaatacttttggtgtcgttttagaggcgcaattctttattgccatttgtaatacggccttgacgatgattggtctggcatttatgcatatgccgcaaattattgccttaggcttaatggtctttattttaagtttagtgccagtagctggtgtgatcatttctttaattccattaagtattatcggctattctgttggtggcattcgttatgtgatttatatcttcattatgatcatgattattcatgcaattgaggcctatgtgttgaatcccaaatttatggctagcaagactgaagtaccaattttctatacttttttagttttgttagtagctgaacacttctggggtacttggggcttgattgttggtgtaccgatcttcactttcttgcttgatgtcttagggattaaatcggcgaagaaaagtaaaaagaaagcgaataaataatgagagtacttttgacaggtgatagcattattgcacgccaggaaggaaaaaatgaaccgcatcttaattggaatttgcaccaattattgccagatattgaaatagaaaataccgctgtttcggggattaactccggggccttttttgccaaattaaatgaattagtactaagcgtaaagcagtgcgataatttggtgatcttgctgggaaccaatgatttggctatgcacaaacaagtgccagcaaggcaatttaagcaaaatatggaaattatttcctcggcaataatttgtcaatattacccaccacatgttctgcttgtttcgccgccagctgttgatgaagctaagcaacgtgtacggaataatacgttagtagcggaatatgctcagatcgtgaaagaagtagcacatgagtatcattttcgttatgcagatctggcacaagctatgcgggatactggcgatttaagcgagatttgtcaaggagtaaaaaacgatggacttcattttggtgatcgtggctatgagattttaggaaaactaattgctgaaaatttgaaacaaatgtaaaaaggaccgcaatttgcggtcctttatttttcgctattttaatgttgcccaaagcaagcttccagctagcgcaatggccaagaacggaatgagcaaataggcaaaaaagaaaaacataattcctacgactagtaaaaagccgataattttaatgaggccaattcctaatttaaagaatagccagagtaagagtaatgttaataataaagaaagcatattaatacctccataaatctatgagagtattttactaccaaattggacgaatagaatagtaggaagattaatgctttagaaaaatttagttaccggtaacaagataaattatattgaaagctctttctgtaaccgctatattttaactattgaaagcgatttaagaaacgagaggaaaaataaatggaggagaaaaaaactgggttacctacgctagctagtacgacaatttggatgattagtttggggtatttgggtgtgcaaatcgcctttactttggaaacatcacagatgagtcgaatcttccaaacattgggtgctgatccgacaaaattaggctggttctttattttaccgccgttagctggattggtagtgcaacctggaattggatcattatccgatcgaacttggattcctaagattggacggcgtttgccatatttattagtcggtatgatctttgccgtaattactatgattttgttaccaaatgttggtagttttggtctaggctatggttcaattgaggctctaatatttggtgctgttgcaatcgcgatattagacgtggcatcgaacatggcaatgcaaccatttaaaatgatgattggtgacatggtcaatgatgaacaaaagtcatatgcctatgggattcaaagcatgttgtccaactttggtgctgttattgccgcatttttcccgttcttattaactagtttgggtgttgctaatactgctaaaaagggtgtggtaccacaatcagtaattatttcattttatgttggtgctgccgttttagtcattacatcattgttcacgatattcagagtacatgaatatgatccagaaacctacgctcgttatcatggaattaaagaatctgataatcaagaaggcggtggttggattgaactgcttaagaaggcgccaaaagtcttctggcaagtgtcattagttcagttcttctgctggatttctttccaatatttatcaacttacgctactggtgctattgcacaaaatgtttggaatacgaccaatgcctcctctgcaggctaccagattgctggtaactggtttggtgttttaactgctgtacaatcaattgcggcagtagtttggtcatatgttttagcgaaggttccaaataatcaccacaagctaggttacggtatcagtttgctactaggtggagtaggatatacttcaatcttcttgattcattctcaggggtttttaattctatccttcattttaattggtatcagttgggctggtatgaatacttatccattgacgatggtatctaatgctttatcaggtaaacacatgggaacatacttaggattgttcaattgctcaatctgcttacctcaaattgtagcatcactgctcagcttcatgattttcccaatggtgggtaactccatgccagcaatgatgttgattactggtatttcaggcttcttaggcgctttatcagttttagcaattaaggaaacctacgtaaaatagcataatttttccgataaaaaaacactgcgtgcattgtcaatgtcattaagttaagctattgacattggagaaaaaacaattaaagcatcatttggctttagatagccaatttgatgcttttttgtgtacgccaaataagcgtagtttgtatttcttttttattaggccacgcgatacatgtaatatactgcagacttggcttttaaatttcgtttgtcttttcgcctttatttttgcaaaaaaaagaatcgaatccaaatgattcaattcctaaaaagatcagttttcaaaagtcaatagcttaacttaatgacattgcattttgaataactgcggagatttttggtataagtcccttaacgatgacctcggctcttattataataagaaaatccgcaaattcacagtgttcatattatagctgtcgttcactcttaacttataatcctaaaataacgttctaatctgtgaagtattgcagaatatcctcctcagttaggcgttttttgtcgtcgcctttgacatcaaaaacgattctaccattgtttaaaatgatagtgcggtttccgtatttgattgcgtcttttaattggtgagtgatcatgacacaggttaaatgctcttcttgcacaactttatcagttagttcaagcaattcgcggctagtatttggatctaacgccgcagtatgctcatctagtaagagtaaatcagggcgcttaattgtcgccattaaaaaacttaatgtttgtcgctgaccaccagaaagattacccacaaaagtatttaagcgttcatttaacccattagggagttgggccgcctggcgtttaaattcttgcatatgtttatctaggcctcttaaacgcagaccgcggtgttcacctcgtttggttgcaagtaataggttttctgcaacagtcattcgcggagctgtacccattttaggatcttggaatacttgggcaatatatttagcgcgttttacttcagaaagattggttaaatcttggtctttgagcagaatttttccgctagtaggaaaaatagagccattgataatatttagtagcgttgatttaccagcaccgttggttcctaaaagagtaacaaaatctccatcttcaagttttaaattgatgtttttgaggatttgcttttcctcattggtaccagcattaacagtagtagtaatattttgtaaatcaagaatagtactcatggtttttcaacgcctttctttaataacttacgagtgcggaatttttgttcaaataatggaagcatcatgcaaatagcaagaataatagcggaaatcaatttaaagtcgttggtactaaagccaagttggaggactaggagtaagataaggcgataaataatactgccgataacaactgctaccaagcgggcggttaaacttaaattaccataaacgacttcaccaataatgatggcagctagtccgataaccatagtaccaatacccatattaacgtcagcgtaaccaccgttttgggctaataatccaccagctaagccgatcaagccattagaaagcattagacctaagattttcatattatcggtattgatcccaagagattgggccattttttcgttgtcaccagtggcaataaaggcttgaccaagatcagtatcaaggaaaactgctagcaaaacgatgacgataatggcaatgatcaaaccaacaacaatagtaggaaaattgatcggtaatttttgtaaaagctgaccgtttagtaaagtatttttgttaagtaaaccaacattagccttgcctagaattctaagattaactgagtagacgccagtcatcgttaaaataccagctaaaagaacaggaatttttcctttagtatatagtaagccggttactaagccagtgaccatgccagcgaagaaggaaagaatggtagctgctaaaggattgacgccatgaactaaagcactaacacaaattgcggcaccgaaggggaaggttccttcaacagtcatgtctgggaaatttaaaattctaaaagttaggtagaggcctaaggctaaaataccccagagtaagccttggccaatagaagaagtaattaagctcatttgataattcgtcctttcttttgggcagcttgaattacactgttaggaatagtgatgtttaattcatgtgctgctttttcattgattactgtttcataatgggttacgcgtctgactggaagagcagcagggtttttaccatgtaaaatttgtcctgccatttgtccagttaagattcccatgtcgaattgactgacacacctggtagcgagaccaccacttttaaccatagtatcggcagcaggaaaaactgggatcttggcactgttagtagcctttaataaggtggcaattccactagctacagtattgtcggttgggacataaactgcttgaaccttgcctaccatggtttgggcaacttgttcgatatcattggttgaagtgatagtgtaagggataactttaagtcctgttgcttcagctagtcgtctgaattcacggtactctgatgctgatgaatcatcacttgaggtgtaaatgacaccgatgtttttggctttaggtagaatttcttgcattaaggccagctggctggcgattggctggcggtcctggacaccggtaattttaccgccgggatgcgctaggctttttactaaatgggccccaagaggatcgctgaccgcgcccataactacagggatgttgccagaagtattagctagagattggacagcaggagtggcaattccaatagttacagtcgcattttcctggctaaaacgatcgctcattgatttcagattactttgatcacctggggcattttgaaaatcaattttaagattttttcctttgacatagccttcatctttgagaccctgaataattcctcgatgaatctgatctagagcggggtggctcattgtttgcaagataccgacagttggcgttttcttttccgcatttttcttatttacttcactgacaaatgcaactgccagaaaagcaaaaagagcaataattgttccgattaaccttttcattctttttctccttcaaacaaaaaaggcacttccttttttcgggaaatgcctaaaacaaaacccgcacgttattttccgtgcgagcaatatttcttgaagattttaccagcacagatacgatcttaatgagtcgcatctgtacttcacgaacagaaacaactctagtgctggaattgccaacgattgattgctgtaaatttaatcatgataaaatcttcctttcgttcaaatttgttagctaaattttaagtaattatgagaaagatgtcaaatgattttttgttagatttatttagttttgaataatttttaaaatgctataataattattccggcaaccatcataaaaagaagggaggaattctcttgcgctatcaacaaataatttttgatgtagatgacacaattatcgattttgcggcaactgaagattttgctttacatagcttgtttaacgctcatcactggcctttatctgcggaattgcagcggcagtatcattcttataatcaaggactttggcgccaacttgaacaaggtgaactaacttatgaagagttaagtgaaatgacttttcatgattttattttggatcattttggcattgagattgatggcaagaaggcaatggatgaatatcgttcatactttggtgaagcacaccaattattgcctggggttgaagatacgttgaaatttgctaaaaagcagggctataagctgaccgttttgagcaatggtgaaaaatttatgcaaaatcaccggttggagcttgctggggtgaaaaaatattttgacttaattgttacgtcagaggaagcccattattctaagcctaatcttcatgcctttgactatttcttcagtcgaactgagatcggtcctagtgagacagtcttttttggggacggcctacaatctgatattttaggtgcagaaaaatatggctttgatagtatttggtacaatcatcgccatcgtaaaaataccttgcatttgcatcctaagtttgtagtagaaacttatccagaattggttaaattaatgcagaatgattttgagaagaagtactaatcattatactttttgctcttcaagaagatgccccaaccaatagttaataagctgacaaaaattattaaaatccaaaagccgttttcattttctttacctggtaagccgccgacattcatgccccaaatgccactgattaaagcgggaagagcaattaccagggcagctgaatctagatatttcattaaatgatttaggtgactgtccatcatggcggtaaagaggccgctaatggaattgagcaagtcagtgtaaacgtgaatcattttggtaattcgtttttgcttggtcatgatacttttgacgcgggcttgatttgctagcttgttttctactaaataattaccaaattcttctagactaggtgtttgatcatctaaggtatgctttaagtaaactagctggcgagttaaatctgttactttttttaattctttggtcttagttgttcttcttgcagcttgatctaaatggtcaattttttgtttaattgttactaattctgcatgaagatgcttgatttggatacacaggctttgaaaaattgtttcaataatattttcttgcggttttaattctgaaagacttcttgttgtgccaataaagagatgattttggtcaaaaattgtaaaaattggaattagctcttgttcaattggcaagtcattacttaatagatcgaaactcactaataagtgaccattttttagtttattagaatcaatagggataaaacgagcaacctcaatcgaggaattagggtaagtgaaaattgtaggatctagatcccattttttgattaaatgatcgatatcgttttgcgtcaattgatcttttaaaattatattctgactattagtaagcatatttgttcacctctgtttcttttttagtttaagattaacatgtaatgttttttagactgaattaagttgacttgaaaatatgtttttttaaaaaatatagaaaggtgagaatatggaattacattcacttactgatacttatactttgaacaacggcgtaaaaattcctgtaattggtttcggtacttggcaaacaccaagtggagaagttgcaagagaatctgttgaagccgcacttgaggcgggataccgtcacatagatactgctgcagcttacggcaatgaagaaagtgttggcgaagcaattaaacgtagtggcgttaaccgccatgaattatttgtaactactaaattgtggaattccgatcatggttatgacaagactaaaaaggcaattgatactagtctagaaaaattagatttagactatcttgatctttacttaatccattggcctaatcctgtagctatgcgtgacaactgggcagagcttaacgctgaaagttggcaggcgatggaagaagcagtgaaggctggcaagattcgcgcaattggtgtatccaactttagaaagcatcacctggatgaattaatgaagactgctgaaattaagccggtagttaaccaaagttacttgaatccgagtgatttgcaaccggaagtaacggccgcaagcaagggatatgatttgcttaatgaggcttacagtcctttgggtacaggtggtttattaggcaatgaggtagttaatgcagttgctgaaaactatggtaaatcaccagctcaaatcttgattcgctggtccttacaacatggctttttgccattgccgaagtcagttcatcctaagtatattgcggctaatggtgatgtctttgactttgagattagtccagaagacatgaagaagttagatggtttacgtggtgcaagtaagttggctaatgatccggatgaggttaacttttaatttaatttggaataaagaaaattgaattatcacaagaagtatcttatttttgaagtaagatacttttttattaggtgagacaatgaagaaaattacaacaggaattgtagctcacgttgacgcgggcaaaacgactctttctgaggctctgctgtacaaggcaggaaatttgcggacgctaggaagagtagacaatggggatgcttttttagatacagatcaattggagaaaaaacgtggcattaccattttttctcatgaagctaaattaacgactgatgatttagaaattacgttgttggacacaccgggacacgttgatttcagtgcacaaacagaagaaacgctgagtgtacttgattatgctatcttggttatttcaattacagatggtgtaactagttatactcgcactttgtggcatttgctcaagcgatatcaggtaccagtttttatttttgtgaataaggttgatgcgataggcgctgatcgagggatggcgttggttgatattcaaaagaacttaagtgagagttgcgttgatttttcgaagattgatgatgaattttatgaaaatgtggctgccacagatgatgccttgcttgagaagtatttggatagtggtgccatttatgatcaggacgtgcagaatgcaattgtgcagcggaaagtttttccaatttattttggttctgcgttgaaattaacgggaattacggaatttttagctggttttagtaaatggactaaggaaaaggaattctctgataagtttgcggcacggtgctttaagatttcgcatgatactaaaggtgaacgcttaacttggttgcgaattttgggtggtagcttaaaggcaaagactgagctagctggtgagaaaattaatcagctgcgtagttataatggtgaaaaatttgtaactattactgaagcagctgctggagagatcgttgctgcaacaggattgactaagacgtatccaggacaaggattcggcgtgggggatgcaccaactgcactgcttaagccagttttgacctataaagttaatccccaggataatgatcttcacgcttgcttaaaagctctgcaaaccttggaagatgaagatccacagctgcatgtgacttggtccgaacatttgcaagaaatccacgtgcaagtgatgggaaagattcaattagaaattttagaacagttaatgaaagaacgttttggtttgaatattgtttttgaacagggaagtattctttatcaagaaacaatcactaaaccaattgaagcagtaggccactttgaaccgctacgtcactacgcggaagttcatcttttactggagccactgccacgtaatagcggtattgtttttgaaaataaatgcagtttagaagttttgactaaaaattggcaacatcaaatcatgacggcattgaagtctaaagaacatcttggtgttttgacagcttcgccgattacagatatgaagattaccttgatcggtggtaaaggctcaattgtacattcggttggtggcgatttccgtgaagcaacttatcgtgcagtgcggcaaggtttaatggaaaaaaagatacgccaacaaactattttgctcgaaccgtggtatgatttccgcttagaaataggaaaagatcaggtagggcgtgctttaaatgatattcagcgcatgaatggaaaatttagtacgcctgaaaatattggtgaacgaacagtcatatccggttctgcaccggtagctgaaatgcaagattatgcgacagaagtgcgcaattatacgcatggtgaaggtaatcttgaatgcgtagtcagtggttatttgccttgtcacaatgcggcagaaattattgaggaaaagaattatgatcccgtttctgatctggagaatacgcctaactctgtcttttgttcacatggtgcaggtcacaccgtcacttgggataaggtgccagagactgcacaatatccttatacttatccattagattagcatgataccatgaattgtttatcttgttacatgtgaaacattaaaaatgcggcatagtgcttttcttattaaaaagtgcaacttgaaataagcgaaatatttgactagttatgaaagaaatttcattttattagcaaaatactgctagaaaatcgcttgcatagtaagataaaggtacgatagaaaggtgataaaacatgacacaaataccttttaaagctgtagcggttgatctagatggcacttttttgaccgaaaaaaagacttttgatcatgcgctatttgcaaaagttttacgaaaattgcaagctaatcaaataccgtttatctgtgcaacagggaaccaactaattcgttcgcatgaatattttgacgagtttactaatgaagtagattatgtgtctgaaaatggggcaattctagaagccgatggcaaagtatttaagcggattgcgattgactatgatactgcacaaaaattgttacattttattcaaacagaataccctgaagcaatcattatggttagcgcacagcatcattgctatattttgacgagtatggatcaagcggataaagacgacattagaatttattatcgtgatgttcaggaaatcgatcagtttactgacattgatccagccgatgcgatcttgaaggtttgtctgacagctgatgatgaactggcgcaggtgattcaggatcggtttaatgaaaaatatggtgactgtattcgcggcactagcagtggtaatatgacaatcgacttggtgcataaaggcattaataaggccaagggcgtagacgatatgcttaagcattatggcattgcgcaaaaagatttgattgcctttggcgatggcgaaaatgatattgatatgcttaaggcatgtggctatagttatgcgatgaaaaacgccaatgcgaaggctaaggcggtagcaaagtatgaagcgccaacgaatgatgaaaatggtgttttgaaagttttggctaagtatttagatattgattaatttaatacgcaaaaaagacttgagaagtaattttcccaagtcttttagtttgctttattaactgctctgaaaatattaagtccgctaattagaatgatgaatccacaagctaaaatcagaaccgtttcaccagagctgtctaacaaaattccggcaacaattgaactaatcggtccaccaatagaggtactggtacgaatagtagttagcactctgcctaatatttcatcgtccgcagtaatctgaatcaatgattctgccaaaatattgtgaatactcgtcattagcccaaataagaaaattagtcctgtgaatatcaaccaattgttactgaagaaaattatcaaaagtaatggtactgcactagctatccaagtaaaaccaattgtttttacccgtacggataatcttcctgcaatagttgcacctattacaaagccaatcataaaactgatatagaacatactgtatagtcccgcttgaccattttgttgagcaattcttggcaacagaatggccattgctggcgtcacaaaagaatacaggattgaggaccagaagtaatgacttaagaaataatttgttttaataaacttatagccattaagaatttgattgaggtattttgcctctgcttttttgactttaggtctatctttaatttcttttagggcgtaaaacagaaaaacaaaactgattaggctcagtagactgcagatcaacattacattagctgaaattaaaaaagttaataaaaatccagaaagagcagttcccgctacattcacaaactggtcgatgttgctaactttagaaattagattatttaattcttggtcatcagccgttgtttcttttaaaatagcccggtcagctggattaaaaaattcatcgcagacagatactattcctgcgcagattaatgccaaaatataacttttgctaagttggtaaactgcaattgttgtggcaaataggaaaacagtttgaacaagaattgaatagtaacttgtccttttgaatgaataatgatcgataatggggccgtagaatattgataaggcggcagtggtggaaaagatggcttccgcaattccgacgacaaaggaacttttggtggaagtttgcagccaccagataaagaccatgctgaagagggaattagctagtccgccaacggcacgcgagaaaaaatatgatttcttttttaacatttgaagggttcaccttactatcatttggtcaaaggtatcgtatccacaccatgaatatggatggtttctaataattttatctatttttttaaatacatatttagactcattaacaatgcttgctctgttttgaatttttgacggataaattggatcttcgaaagtgatcttgattttgtatttttctgtcatttcagtatgtaagataataattggaacttgcattttattgcttacccaagagctacctaatggcattgaaacacgtgctcctaataaatttacagtatgttgtggccctagtcccattgaaatttctggtggaattgctactactttgccttgtctgatgtcttttaacgcttttcttaatattaatgggtatggaacaccataactatcaacaagagactgtaaaatagtttgtgtaaggatgaatgattccttaaatttatttctttaaacattagaaaaaggagttcctttctcgtatgattggtttgaacaaaaaaacacatacagaaagaagaactccttcatgaatgattttaccaaagattttgctcaagctctattcaatccagacaaaataaatgatttattgcgcaaagagctacaacaggctgttaataacttgttagaagctgaattgactgcctttctgggctatgatccctatgccagaaatggctggaatactggcaactctagaaatggtgcttatttccgcaaagttgatacgcaatttggcccaattgaagtgcaagtgccccgggatcgcaacggtcaatttcatcagcacacgctgcctgactacaagcagcactcggatatcttggaaagcatgattatcaagctttactccaagggcgtgaccaccagggaaatagccgatctaattgaaaagatgtatggcagccattacagtccagctcaggtatcaaatatttccaagcagatgattccaaaggttgaggcttaccacaaacgcaagctaagcgacaagtttttctgcgtctatttggatgcgacataccttcctttgcgccgagaaacatttgagcgtgaagcagtctatattgccattggcatcaagcctaatgggcacaaggaggtcattgactactgcattgcgcctagcgagaacattgaagtctggacagatatgcttcaaaacatgaaatcccgaggcttaaagcaagttgagctttttctttctgatggtgttgttggcatgaaaacagccttggccaggacttatcctaaagctcattttcaacgctgtttggttcatgtcatgcgcaatatctgcgctaaagtacgcgtcgacgatcgtgaaaagatcatgaacgaattcaaacaggtgcatcaacagacaaacaaagaagaagccacagctgtcctgcatgacttctataccaaatggggcaaggtttacagccatgttatcagaagcttgaaagacatagaaccagatctgctggtcttttataactatcccaagcagatcagagcttcaatttattcgactaacatgattgaatcatttaacaatgtgatcaagcgcaaagctaagcctaaggcagagtttccaactgaacagtcgcttgatgcttttattggcattcaggcaatgagctacaatgaccgttatttcaatcgaattcataaaggctttggtcaggttcaggacaccttagaatcctactttgattaaataaataattaaaaaatcaatttacgagaaagaactatttacacaaaagatttgacagtttcgtagaaaatgaagccaaacttcttattatgcttgactttacgtagaaaaagacctaaaagtgtctaacttttaggtctcagttcagtgtcaaaaatgacacctttttttattttgaattaaagtttatcagcaattatatccattccattttctctgagaaaatttgatattgttttggctttctcaagtttattattgagaatagattcatagtaattagccattattttagcaaaacaatttttaggatcaattgttaaagaattcagtattttaactgaagcatctatattagtatttataatacgttgctttttttttatgaaataacttaaataattaactaagattgcggatattattttttgcttttcttcaggaagtgaatttatattatgggtgttctttataatattttttacaacagaatttatttcatttggatcaaaaatggacattgaaatagcaaatagtcttaagctattttccgtccaattatctgtttcgaatatagttttctttatgtattgtttttcatcattagaaatctgggctaaagtatttgaaattgctgcttttataataataatttgtgccctaatattatccaaatttagttcactattgtttctatcgtttagcattttttctaattctgttattttcgacaaatctttttgatagtaagctgtgtgtaataaattatcacaatcaattttagatatgtgatttttattagtattattttcaacctttttaaaaaaagaagagtaatcaatattatgcaaacttaaaatttgtaataaatcatttgctctaatactacaaatatcgcgttccactttagagtaaaatgatttagtgagtatgttgccagccattttactttgacttagatttaattgttttctttctaacttcaatgcctcgccaattttcattttctttcctccaatgtcggataatgactaaatcatcatttgctttctgatataaataaatttatgcaattgaaattttatgtcctgaaaagtatagggtaaattattcaagaataagatactaaatatttagtatcttattttgcatacaattaggctgaaaaaacacaaaatactaatgttataattgattttagaacttaacaagaaattagggaacttttatgaaccaattatatcaagaaattaatgatgctttatatcatgtatattacgggattcagcggattgaagaagaagaactaaagaaaagtcgtttcaatgatcttactcctaaggaattgcatgcagtagatgctattactatgtatgaacatcctactacttcgcaagtagcagaaaaattgcatttgtcacgagctacaatgactgtgactgtcgatcggctagttagaaaaggctatgttgaacgaatccgaggtaagcaagatcgtcgtattgttcatttaaaattgacaatgcgaggcagagtagtgtgccgagcatatcatgcttatcataatcgaatggttaaaagttttttgcaaaatctagatgagaatgaattgcaaacaatttatcatgcatttaaaaatctggatgagtttttgaactcacactaatattattttgaaattgcttaagcagactggagatattcagtctgtttttttgtggacgaaaaaaatttaattacatagaagtgttcttagtattagtgtaaatagaatttttgagttctatatgaacttgtaatgtgttgacaataaaaaaagagatgataagatttgaatatcgaatagttagatatactaattttaaaaaacgaacatggagatgaagttatgccaatgaatactgctgagattcaaagcaagttagattgtcaagctcccttgatgctgttagatcgagttacaactttgaataaagatcaacaagtaattgctcaaaagagtgtgagtgctaatgaatcttattttcaagggcactttcctgagaatccaataatgccaggtgtgctgctaattgaagccatggtggaggcaacacaatttatgtgggatcggtcagatttgattcttactagagttaaaagaggccgctttcgtgagatggtcaagccagggatgcagttgacaattaaggttaacgccattaaaaaatacgcatgtcaggcaaaggttttaattgatgataaagatgtttgtgtagcagacttggaatttaaggtaacagaagaaaattgaaagatgtaaaaattatagcaactggttttgctgtgcctgagcatgtcgttactaatgatgatctcagtaagatcttggatacttcagatgaatggattgttaaacgaacaggcattaaaaggcggcatattagtcaaaatgaaaatacttcggacttggcaactcgtgtagcaaaaacattattgagtcagagtaatgtaagaactcaagatattgatctgatagttgttgcgactatgacacctgataatatgacaccagctacggcagcgattgtccaaggcagaatcgctgccgaaaaggcggtatgttttgacatttcagcggcttgttcaggcttttcttatgctattagccttgctagaagcatgatgcttaccaataattggcgtcacgcaattgtaattggcgcggaggttttatctaaattgctagattggactgatcgctcaacggcagttttgtttggtgatggagctggtggcgttttattaagtcaaagtaatgccactcatttattgggacaaagtttaaaaacttatggtaataaaggtgatcaattaattgcaggtcatttagatgtttcttatgacattttgaaaaataaaaaaagctatcagcctttaccatgaatggacaagagatatatcgttttgctacgcatgaagtaccacggtcaattttgaaagcttgttcaaatgcacaaattgaacttgatcaaataaattattttcttttgcatcaagctaatagtcgaatcattactcaagttgctaaaaagttaaatcagcctttaagcaaatttggtgtaaatattgacgagtatggaaatacagcggctgctagtgaagcaattctgctggctgaaataattcagaaaaacagaattaagccaggcgaaatcattgctttaagtggctttggtggtggcttaacaacggctacattgattattaagtattaatacgaggagaataaaaaatgactaaaaaagaaattttaaaagatgtacaagaaattgcccaagatgaattagatgttgaaccggaaaaaatcacaatgactaccaacatcaaagaggatttagacgccgatagtctagacctttttgaaattttgaatgagttagaagataaatacgatcttgatttagatgctgatgagagcatccaaacaattggccaattagttgattttgtacaagcagaaatggataagcaaaaataatgagttacggtattctgtttagcggccaaggcgcgcaaaaagcgggaatgggacttgattttttagacgatgatctatttaaagaaacgattgaaaaagcaagtttagctagtcaggaagatttggttgccattcttagagatgaaaatggagaactagataaaacaattaatgttcaacctgctctagtagcctttgaaataggaatttttcgtatgcttaaaagagactgtccccatctaaatattagtagaatggttggtctgtctttaggcgaatatagcgcaatgtatgccagtggtagtctagatttagaaaataccctgagcttagtcagtgatcgggctcgttatatgcaagaagatgctgatcagattgaaaacggaatggcggctattttaaaacctaaactcaatgatattgaagttttaattcaaggcctgcaaaagcaaaacaaacgagtttatattgctaactacaattcgcctaaacaagtagttattgcaggtgaaaaatgtagcgttgcattagcttctaagcaaattaaagatcaagatttggctaagcgaattattatgctaaaagttaacggcgcctttcatacaccactatttaataatgcaaaaactaaaatgacgaagcgattagcaaatataaagtttcaagaaagtaaaactccggttatatctaatacaactgctctgccttttagtggaaattggcgtgagattatggctaagcaattaacagtccctacgcattttggctcatgtattcaatatttagttgaacatgagcaaattgatcaaactttagagattggtccaggcaaggtgttatcttcatttgctagacaagtagatcgtcacttaaagtgtagccatattggcaattatgcagaatatcagacttttgtagaggaagaacatggaattaaaggataaagttgtttttattacaggctcaactcaagggatcggcgcagcaatggcagttgcatttgccaggcaaggcgccaagcttattgtgaatgggcgaaaacaagagttgcctaaagatttaaaggatgcattggataaagagaatgctgattatcggtatttatcagcagatttagcacaggacaatttagaggagataggcaaaacagcctggaatttatttggtaagatagatgtcttgataaataatgcaggtcaagcaaaagataaaatgttcattggtatgcatgatgctgatttcgaagaggtattaaatttagatttgaaagtaccttttttcttgagtaaagcaattatgaaaaggatgaataaagagcgttccggggtcatcatcaatttatctagtgtagttggcttacatggcaatgtgggtcaagcaaattatgcagctgctaaggctggtctaattggttttacaaaatcaattgcacgtgagggagcgttaagaaatattcgagttaatgcgattgcaccaggaatgatagatactgaaatgacacaaaaattgtctgaacgtgttaagaaaaatattttggaacagatacctttaaaacgtttaggttcaactaatgaagttgctcaaggagcggttttcttagtgcaaaatgattatgtgacaggacagacaattgtaattgatggtggaatgaccatttaaagaggcaatatgcaaagagtagtaattacaggaatgggggccattgcccctaatggtaatggtgttgaaaattttgttcagaatactttagcaggcaaagttggcataaaaccaattacgaagtttgatgcatctgaaacaggaattagtgtagccggcgaaattgatgattatgacgaaaatgattatgttggcaaaagagaagcaagaagactagatttgtattctcaatatgctattcaagttgctaatgaagcgatggaaatggcagggattgatgaaaaaaatactgccccggaagatttaggcgtgatttttggatccggaattggtggattgactactattcaagagcaagtaattcgcatgcatgataagggacctaaaagagtatcaccactatttattccgatggtaattgctaatatggcagctggaaatatctctatccgttttaatgctaagaatatttcaacttcaattgtgactgcttgtgcttcaggaactaattcaattggtgaagcttatcgtcgaattaaagaaggtgatgcacaggtaataattactggtggatcagaggctactattaatgaaacagcaattgctggtttcgcagccttaacagctttatctactagtacggatcctgatcgagcatcactaccatttgatcaaaaccggaatggttttgtgatgggggaaggagctggagcactagttattgaaagtttagaacatgctcaaaatcacggtgccaaaattttaggcgaaattgttggctatggcacgactagtgatgcctatcatattacttctcctgatcctaaaggagttgaagcagctcgttcaatgaatcaagcaattgtacaggcaaatattgatcctagtcaagttggatatgttaatgcacatggtacagctacacatgctaatgatgctggagaaagcaaagcgattaaccaagtttttggaaaagatagttcagttttagttagttcaactaaaggaatgacaggtcatttattaggagctgcaggtgccattgaagctgtaattactgttgccagcttagaaaaaggaatcttaccaccaaatgttggttgttttaagcaagatccagaatgtgaagttaatctagttaataaagataatcaacagcaagatattgagtacgcaatttctaattcttttgggttcggtggacataatgccgttttagcttttaagaaatggagcgagaattaatggacttagaaaaaatacaagctttaatgaatcaatttgaagattcagatttacgtgaattgaaaattgatgatggtgatttccatttctatttaagtaaaaacaagaataaagttactcagacagtacagccgactgttcaaaagaccgctaaaaaagtggaagaaacagctcaacctgttgttcaagagaatattgacaccaaggttaaaccggttaaagcacctatcgttggagttgtttatttgcaggctaaacctggacaaccagcctttattaatgtgggcgatcatgttaagaaaggcgacacaatttgcgtgattgaggcgatgaaaatgatgacggaagttaaaagcactttaaccgggactgttagtgagataaaagttgaaaatgaagacctggtcgaagtagggcaacctttaattactgttaaggaagattaatttatgagtaaagaactagggattgacgaaattaaacaaattattcctcatcgttttcctatgctgttaatagatcgcgtcttgtttctaaaagttggtcaggaagctaaagcagttcataatgttagttttggtgaaagctttgttcaagcaagttcctctaaagatccagtttttccttctattttaattgttgaagccatggctcaaacaggtgcagttgcattattgagcaaggcagattttgccggcaaaaccgcgtattttggtggaattaaggaagcaaatttcattgttcaagcaaggccaggggatcagatagttttgacaacaaagttaactaaaatcagaaaaaatattggcattggcataggtgaagcgtgggtaggcaataagaaaattgcacaagcagaactaacgtttatgattggttaggtaaaatgaatgtttaaaaaagttttaatagcaaatcgtggtgaaattgctgtccgtattattcgttctttgaaggaaatggggattaaaacggttgccatttattcaactgcagatcgagaaagcttacatgttcaattagctgatgaagctgtttgcgttggtggcccgcaacctactgagtcatatttaaatattaaaaatattttagcagcagccgtaggcatcggggcacaagctattcatccgggatatggttttttatctgaaaatgcagaatttgctcaaatgtgtgaagattgtggcttaacttttatcggccccaaggcggaaacgattgatcaaatgggcaataaggaacatgcgcgtcaattgatgatggcacacaatgttcctgtaactccaggatctaatggagttattaaaaatgctgaagaagctaaaaaaattgctgctcaaattggttatccagttttgattaaagcaacagctggcggtggaggcaaaggaattagacaagtaactgatccaagtcaaatggccgaagctttagcggctgctcaaagtgaagctaaaaatgattttggagatgatcgaatgtatctcgaaaaggtaatgcaaaatgtaaagcatattgaggtgcagatttttcgtgatatgtacggtcatacggtttatttccctgagcgtgactgctctttacaacgaaataagcaaaaagttttagaggaaagtccttgcgatttaattacggaaaatgaacgtaaagaattgggtgaggttgcggttaaagctgcccgagccgcaaattatgttaataccggtacaattgaatttttgatggatcaagatcatcatttttattttatggaaatgaatacgcgtattcaggtagagcatactgtaactgaaatggtaaccggtgttgatttagttaaagcacaaattcaggttgcgaatggaggaccactgccttttacgcaaaaagatttacgggctaaaggtcatgcaattgaatgtcgaattaatgcagaggatccagcaaataattttatgccatcaattggtaaagtttcgtacttatatttaccagttggcaatccggggatgcgcattgataccgccttatatcagggacaacaaatttctccttactatgattctatgttagctaaggtagttgctttgggcaatacacggaaagaagcgattgctaagatgaaacgcttacttgaagaaatagttctgcaaggtattactaccaatcaagaatttcatttaaatatactaaatgatccaacttttattaaaggtgactttaacaatacttaccttgaacaaggctttatgccgcaatggaggagtgaaataaatgaaactatttccgcataaaaatactcctactgatacacatattaaagcaaataaagcggctgatgatcgagtacctgatggactgctgcgcaagtgccccaaatgccatcatgaaatatttgcgaacgaattaaataaattctatgaatgtccatattgtttttacggctttagaatctctgccaaaaaaagattatcgtggttagttgatcaagtacaggaatgggataaggatattgagtcctcgaatcctttaaaattccccgattatcaaaagaagatcaaacatgctcaaaaaattagcggcttaaaagaatcagtttggacaggcttagctaagattaaccaaacgcaattcgccttggctattatggatccaacttttattatgggatcgcttggtcaaatgactggtgaaaaattaacgcgtttgtttgaaaaagcaacgcttcagcatttaccagtcgtactgtttgcggcttctggcggagcaagaatgcaagaagggattcttgctttaatgcaaatgggcaaggtatctaatgcagtagctaggcatagtcaagcaggtcttttttatttagtagttttaacagatcctactactggtggggtgacggccagttttgctagtcaaggagatattattatagctgaaccacatgctatagtgggttttgctggtaaaagagtaatcgaacagactattcatgaaaaagtagcggcagatttacaagatgcagagaacgttttgaatcatggttttattgaccatattgttagacgctcacaggaaaaaagaatcattgaatggttaatcaaggtaggtggctatcatgactaaaaatgcaattgatatagttaaagctgcaagagatgaaagtcatatctctggtcatgagatacgcaaacttctttttcccgatttttttgaattgcatggtgatcggtgtggtactgatgatcctgctatagtaggtgggctagctacttttaatcaagagccagtaacagtaattacaactagcagaggacatttacttaaagaaagaattcaaaaacactttgggcagcctgaaccaggtggttatcgtaaagttctgcgtttaatccaagatgcaggtaagtttaggcgacctgtttttttgtttgttgatacagctggcgcttatcctggtaaaagtgcggaagaaaacggccaaggacaggcaattgcacaaaatttgcttaaagttagtcaaatacctactcctattattacggtcatgtatggagaaggcggctctggtggtgctttagcgcttgcctgcggagatgaagtttggatgttggaaaatagtatttattctgttttatcgccagagggctttgcttctattttgtggaaagatgtaaaaagagcaagtgaagcggcggaagtcatgaaattgacgcccgatgatttactcaagatgaatgtgatcgaaggtatcatcgccgaaccggataatcatcaagaggtttgtcaaaatatagcagaaaagctgcaaagtgagataaacaaattaagtaaattatccgaggcagaattgcttgctaagcgatacgaaaggtttagaaagttttagaggtaaaaaatgagtggatttttagcaggaaagaaaatcttggtaatgggtgttgccaataatcggtctattgcatggggatgcgctcaagcaatggaaaaacagggagcaaaaatcatttatacttaccaaaatgagcgattaaagaaatttattagcaaattagttactgatgaagattgcctgattgaatgcgatgtggcaagtgatgagagtattggacaggcttttggtttgattcaatctcgttttggcaaaattgatggcattgttcacgcgattgcatttgctgagaaagaagaattaggtggctcaattttaaattccacaagagagggattcagccaagcagttgatatttcagcttattctttcttggctgctgcaaaagctggaatcaaaatcttaaataatcctgcaagccttgttactttaacctatatgggatcagaacgtgccttgcctaattacaatactatggggattgctaaggccgctttggaatcggaaatgcggtacttagcgcgagacctgggtgaaaaaggtgttcgggtaaatgctatttcagcaggagctatgcgcactctggctgtctcaggaatccagggtcatgcatcattattgaagatttctaagagtaagactgttgatggtgttaatgtgacacaagaagaggtaggtaatacctgtgcttttttgatgagcgatttggctagtgggattactggagatgtaatttttgtagacaaaggtgtacatttacgctaatgcaaatttacaaatatcgaaaggttacttcaacacaagatcttgcaaaaaaatatttagcaaataaagctcaagaaattgctgcatttatagcacaggaacagacggcaggttatggcaagaggggacgctccttttattcaccagctaaaacaggtatttatttaagtattgcgcttcctaattttaagtttaaattagagcatgcaggcttattaacaatagctattggggtagcggtagttcatatactacaagaacaatttccttcgtatgaatttcgtttaaaatgggttaatgacatttatttaaatgataaaaaagtagctggtattctaaccgaaaaaataggattaggtttggtaataggaataggggtgaatatttttacggcatctttcccaaaaaatatctcaaatcatgtcggcagtattgtacaagctgattatgcttttgagaatatgaatgagcagttaattcgagctgttgtgcaggctgctaatacatatcaaaataataaatttttagacgagtatcgcaaaatttcttatctgaaaagtaaagttataactttgaaaataaatcattattatgtaacaggtcgagtagtgacaattgatgatcaaggacggttagttattagttgtcgaaattctacacgttgctattcaagtggtgaagttattaaggtggaattagaacccggatttaagggtaaacagtaaaatagtacaaaaaaagacttgagaagtaatttttctcaagtcttttagtttgtcttaatttaggttaattaaaacttgttcttgtccaaagcaactggagaatctggcttttcaccattgatcatcttcaagttgttgtcaaatgccttaacaaccatgttacgtacagcgtgggtggtgtagaaggcggtgtgtggagttaccaaaacgtttggacgatcaattaagtcagctaaacgcttgtctgggaattctttaccttcccaatcttcgttaaatacaccaacttcgtcttcgtaagtatccataacaaagccaaagatcttacctgagtccaaaccgcggataacagcgtcagtgtcaacaagtggaccacgtgagcagtttacaattacaacgccatctttcatcttggcaattgattcgtaattgatcatgtgtacatttgctggaacatctggtacgtgaagtgaaattacatcagcttgcttgtacaagtcgtcaagtgagtcaacgtagtaacccttcttttcgagttctgggttcttgaagatatcgtaagcaatgacctttgcgccgaaaccttccataattctcataaatacttgaccaatgtgaccagtacctacaacaccaacaacttggtcacgaacttcacgaccaatagtaggtgcccaacgtaagtcgcgcttagccatcttttcgtccatacgcttgtcttgacgtaatacacgagcagcttggattgcagcatgttcagcaatagcgtcaggagagtatacaggaacgttagtaatttcaaagccaagttccttagccttgtccatgtcgatgttgtcgacaccaacgttacgtaatgacatcttagttacgccagcgtctgccaatgcttgaagagtttctggggtgtagtctaattgttggtaaacaacaacaccgtcagcacccttagctaacttagcagtttcaggagtcaaaagcttatcagtgtaatctacatcgatatccttgtgagcatccttccattcgtttaagaatggttcttcgtctttacgaatagcgtaagcaaaaatctttgtcataaatttaacctccgtaaaatttattagtatgaccagtcctcattatacgcttttacttgctcaacaaaacacaaaagaaccatttttttgtatagattttaagaaaaataaaagtcaagttttactctgagcaaaaaagttgcaattttttcaaaaaaagtttatagcctaaaaattgcaactattattaactgttacctaatctcaatcccatagatatgaaaattatttttgtatatagcaatattagttaaaggtagtatatggatttgtataagagacgcattttcgttatataacccaggttatataatggactttaagtagagaaacaaacatagcggaggaaaattgaatatgcattttaaaggagaaagccaacagcatttcagcctaagaaagctgacaattggtgttgcttctgtaataatcgggaccacctttatgttttttggtggtcatgctgttcatgcagatgatttaagtagagatgctgagcaaaccagctcagttgttcaaaaacagagtagtgagaaaatagatgtagatgcagtcaaagaagctgataatgtttcaaatcaaagacaagacttacccagacggtactaagagtaccgcaactgttcctgtaactgtcattgcaccaaatgtaccagacgttatctacgtaccaaagggtgacaagtttccagacccaagtactgtagttactaactctaacgatatcaaggacaagattcctgacacgacttacacttggaaaactactccagatactccaaatactaaagtagtaattaactataaggctaataatcctggtactccagataccccagttactccaccagtggatccaggcgataatccagcaaccccagttaccccgcctgtaaagccagagcagaagccaacaacaccaactcctcatgctactaagacaccagcaaaggataatggtggcaagaagacagtagctagtgagcaaaaatctactttgccacaaacggggaagaaggataacgttgctttgactgctatcggtgtagctattgcagctgctggaagcttattaggattagcagatagcaagaagcatagatcttaatttgtaatatctaatttctgtttactaagaagcaagttgactcagataggagctagcttgcttttttgtctaaaagtttaaggatttctaaagacaaaaagcaaatagtgacgcattgtcataaagctgatattatatactcataacaaaaatacaacgcatcaaatagagatgaattgtaagaaggtaacaaatcttctaattccttattaatacatcctattgggcctttattaattcatacattgggtattgctttttgctggttgtcccctatgcaaccgcgaaagttaagattgataataagtccatcccctttttgcgaaggtaaagagtcaagaccccctgcaacatctcttgcgttgaatcttttgttaatcttgataatttatcttcgcaacattagtgatgagtaggctaatgtaaaaaaatctcgttattctcattcaacacaactcccttaaaagggctggtttagaaaagtcatctaaatcagtcctttttctttttttcgttataattaaacttgagaactaaaacaaaggggaagaaaaatgatcttaatttcatggaatatcgattcattaaatgcagctctgactggtacttcagctagggcggaagaaacgcggcaagttttaactaaaattcatgatgccaatccagatattattgcgattcaagaaactaagctgcgtgcaactgggccaactaaaaaacataaagaagtgttggctgaaaagttccctgagtatgactatgtttggcgctcttcagaagaaccagctagaaaaggctatgctggtacaatgtatctttataagaaaggattaactcctgcagtgtctgagccgattattggcgcccctgagccgatggatcatgagggacggataatcacactggaatttgataaatgctttgtcacccaggtttatacgccaaattcaggcagtggtttaaagcgactagctgaacgtcaagtttgggaccaaaagtatattgaatatctgcaaaaattagatgaaaaaaagccagttttagctagtggtgattacaactgtgctcataccgagattgacttgaagcatcccgaaaataatcatcactcagcaggttttactgatgaagaaagagtcgactttaccaatttgctcaatgctggctttaccgatacctttagaaaagttcatggtgagattactggcgtatattcttggtgggctcaacgtgtcagaaccgctaaggctaacaactctggctggagaattgattactggctagtaagcaatcgcattgctgataaggtggtccgctcagagatgatcgatacaggcaaacgagcagaccactgcccaattttgcttgaaataaatctttaaattgaagcaagccctagtataatttctttttgaaatgtttttattttgaaaaagaagtaggggttgaaattctttgaataacgagaaaaaagaagattgggctttggagcaggatctgaagtacaatcgtctgacagcatttaagctattcgcgatgactagttcaatggttatttccgttgatgaactcgcaccatttggtaaaactggagcaacggcactgttttacttgttaattgctggaatcgcttggtttatcccgattacgcaaatggctggagaaatggcctcaattgatggctgggaaaaaggcggaatcttcacttgggtgaaaggatctcttggagacaaaacaggctggacagcaatgttttatcaatggattcatattactgttggtatggatacgatgatgtatgtgatcattggggcattgtctatcacatttgggacaccttggttcaacaccacgccaatcgtacgcttcattttaatgatggttattctgtggggagcaacagcgattcaggtaattggtgttagaaagattggtcgaatcgctgaatggctgtttattctggggattgcgacaccagtaattttattgattatttcattcttcgtatatgtgattcaggggcatcccttgcatatgacgattaactggaatactgtaattccacataaattgaatggtaatacattagttgcctttgtcccatttatgttggccttttgtggtggggaagcttctgcaccgcacgttaaaaacttggaccacatcaagtcatactcaaaagttatgcttggcttagccgttactgcaatctgcttcgacttgctaggtagtatggcaattggaatgactgtgcctaaggatcaaatagagaacagtacaggctttgtttatacctatggcaagctgttaacgtcaatcgggctacctggtgatctgttgcaaaaaattgtgggtataatgttagcctgcggtattattggtgagctaggcaactggattgctggtcctaatcagggaatgtatgaagcggctaaagagggctatatgcctaagttttttgctaaaaccactaagcacggcgtgccattaagaattatggttttacaatcaagtatcgttaccatttctgcattattgattacttttaccagtggtgccgatgcagattttgcgtttaacgtttcattggccgcaacgacggcgcaatatctcatggtttatatgattatgttgattgcttacatggttttgaaaagaaagcatgaagattatcaccgtatgtattacatgagcaagaaccctaatttgagtattgcaattgcggtgcttgcattaatcatcacggttatagctttctttgtaacttttgttccagcacaaggcacgccaagcaatttgcgtcacgtttatgtttggaccttaatcggcatgtgtgccattgtgtcgattttgccacttattttgtatcgctggcatgaaaaatggcaatcacaatagaattaagaagcattcgtttttcaagacggatgcttttttagtagaatttgagagaggtgaataaaatggcggatgcgatgagggatgcaatattaaatggttttgttgatcaaaattatttaggaagtgaagaattaggtcctaaaatattagctaataatcagcaagagagaatctggcagaatttgcgccaggaattgtatagttgcaagtcctttacttgggcggttgcgtttattacgcaagacatgctagttccgtttaaggtgataatggcagatttagcgaaaaatggaattagtggcacgattattactggtgattacttgggttttaacaatccgcgtgtttttacggaattacaaaagattcctaatttagaagttcgtattgctaataaggcaggtttccatactaaaggatatttatttgatcatgaaaactatcaaactgtgattattggcagtgctaattttacacgttcagctctgctggctaactatgagtgggctttgaaagtaagttcaaaaaagcaagcagatttaacagctcaattagtggataaaattgcagatttgaaacaggatagttttgttttaaattcagcctggctaacagattatcgtaaaaattgggtaaagcctgagcgagttgctactgatcggcatcagacaaaaattttaccaaataaaatgcaaaaagcggctttaaaacagatagaagcactagttacaagtggtgaaaaacgagggctagtagtgtcagccacaggaacggggaaaacttatttaggtgcttttgctgttaagaaatatcagccgcggcgttttttatacattgtgcatcgtgagcaaattgctaaaaagtcattagaaagtttttatcgtgtaatcggtggaccaagatcggattatggcttattaacgggaaataggcacaatttacaggccaagtatttatttgcgacggtacaaacgataagtcaacctgagatgctggctaattttaatagcgatgaatttgattatatcttgattgatgaagcacacagggcagctgcaccttcatatcagcgccttttacattattttaagcccaatttttggttaggaatgacggctacgcctgaacgaatggatgagcaaaatgtttaccagatttttgactacaatttggcatatgaaattcgtttgcgggatgcactggaagagaagatgctggcgccatttcattatgtgggtgtccaggattatgaagcagacggagtagtgattgatgaaacaacagatttacgctacctagcttctacatctcgagtagactatgttttaaaggaattagactattacggctattgtggaacaaaggctaaaggcttggttttctgcagtcgacaggatgaagcacgtgaattagctcggctttttagtcaaaaaggacatcccgctgtagcattgaccaatgaggataatgaaaaaagacgtaatgaagtggttgcgtctttagttaaaggtgagattgagtatattgtagcggttgacttgtttaacgaaggaatcgacatccctgccttgaatcaaattgtgatgttacgcaacacacagtcgagcatagtgtttatccagcagttaggccgggggcttcgtaaatatcctggcaaagattttaccgttgtgctagattttatcggcaattataaaaacaattacatgattccgttggcactgaatcaggatacttctcgaagcaaagatcaagctaaacgagaaacgcgtctgccaagctttattgatgtttcaacgattaactttagtaaaattgccagtgaaaaaattttggcttcgcttgatagtgtcaagcttgatgggatgcgtgaattgcggcagagttaccatgatctcaagaacaaactagggcgtgtaccgctactatttgatttttatcaatatggctcagttgcaccgattgtttttgcacaaaatcatggcttggcaagctatgctgactttttgggtaaaatgggcgaagacgttaatttatcaaaatatgaaaatgaagtgctgtcttttgtgactaaggaattacttaatggtaaaagaattcacgagttacttttgttagagatgctacttgaacaagatattgttaagcaagaagattatctagctcaattgaaacgacaccatgcttatgtaaatgatgaattgttagcttctgttgatgcgattttatcgctagatttttttgatattaagcagggaaagactaccaaaaaagcacaatatggtaaattgccgttagttgaacgtagcaatttatttgactatcaattgaatggttctctacgctctgccctagatcaacatgattttaagaatttatttgttgatgctattaaaactggtttggccttaaatcaggaatatgataatcagcgtcaatttactttatatcagcaatatgatcgtaaggacgcttgtcgactcttgaactggcctaaggatgtttcggccccgatgtatggctatcgtgttggtgagcaggacacaccaatcttcatcacttatcataaagatgatcatgaaaagcggaatgctctgtatcgtaatacattggctgatgggcgcagtttgcgctggtatactcgggtaccacggcatttagattctgatgaggtacagcgtttgcttaatacgcgagggatgaatttgcatatatttgttaaaagaagcgatgcagatggtaagcagttcttttatttaggcaaggcaaagattcaagctgattctgttcgcgaagaattgctcggtgttaagaaaaagccagctgtagggatgaacttaatgttgaaacatccactgagtgagtcaatgcatgagttattatttgaatagaccaaaaaagcctttccgcttaggaaaagcttttttaattgccgctaatattaattagatcttggtcatcttggttattatccttatcaaacattctaggcttgatgtgatctagaatcttagtcccgatatttttctgagcagtttcatcaccgctaacctggtttaaaaacataattattccatatcgattatctgtagtcattttgatccaattaccaaaatgagtgttgcttaagctaccataagcagatttagtatggtcatcatctaaatgaagccctccagaataattagtggttgcacttttaagatgagttaagtaatagaaatcggatttgcttaagatactaccattggttaagccaagctggatcttgtaataatccattggggtagtgaacatattgcctgcgcctggaagctgggaggcaagagtctttttaacgtattcagcgtcttggtaatttttaccattattccagacgtaagagataggatcggttttccaactaggaatatcctgataaaggaatgtattagcaagccctaatttgttaatgatgcgattattgaaattgttttcgtaggattgtccgctgattttaataataattccggctaataaaagatagttggtattattgtagaagtaggttcctggtgtcccttgagtgccgttattagtattatcaatagcccaattgatggcgtcattctcacttaaaacttttccgcgatccaattcagtattggttgcttgaatgccagaagtatgggtcattaactgtccaatagtaatattatcggcgtttttaagattagggtaccaacgtgaaattttggtgttttgcgtaaatttttgactagtgtgccagttttcattcatcagctgaattatcattgctgctgtaacaactttttgcaaagaagcagttggataaactacgttgtcgttcccattaccaacttttttaccgtaccaagcgtagccatagctgatttgttgcggctgaccgtttttgataatgacgatactaccgcgagtattgttttgagccaaagtattgcggacaaaatttcgcatttcggttttaaagtatgaactggcttgaacttgtggtggttcagtgatcgcaaatgcaggaactgtcgttagcagcgcagcggtagctagtccaataattgattttttcaaaaattaaaaggcctcccttaaaaagtggtttgtttacattttagcgcgttctttgcatcggacaaactattatcttggtgaaaagacgtatttttagctagcttgttgaaaaagtgcggctaattttgctctgagtgcgggatcatgagcgtataaataggtaccgcggattcctcgcttgaatagaacgttgagtgaattcatgaccatcttctcttcatattctattttttcttttgagttggttagatcattacgctttttgaacatctcaacatctgtaattttgtctaaattaactttaagttgattggtgcggggaatcaggctgattggtggaccgataatgatgccagcataatttaggtcaaaaccttggcaagtatagatagaaccaacttcattgattgttgtaggaatttctgcccaaggagttgatgtgtagttgtattgatcccatggcagcataaatttcccttctttaatgtaatgtttgccaccatcaagagtagatggatagccggaagttgaaagaattcttgccaggccgtctgtttgatttctcttgacgatttcttgccgcattttttctgcatcagtaaaaatacgaaagtcgtagttgtgccacatttctttttttaagggcattaatttattatgtgtaaaaaagttaaaccattctattagactatctggtgccatcattctaaattgatgatgtagttgatagtcttcgtggggataatgatgagtaattgcttcaagtcgcttacgtgtccagaagcttttcattcgtaaaacttggttttcatcaaataccaaaatgataacttttgaccgcttaataacctcctctaattggttatcgtgataaaagttgttgtagtgatcaggctgagataagagcaagtgtgcttcatcaatgacgacaacatcagcactggtttgttttttgtccatctgattaataaatgaagttggccgcatataatttttcttatatagttctttaatcggcccagcaatctgcttatagacttttagcagttcagggtgatttactaaaaagtagttttgagttttatacagttggctgcctgtttggtggtttaatttttgcaactgatcaaaaagggcagaaagcactacacttttaccagtacctgcttcaccataaatagtgaaaacagcaggatgatttttattgctgcaatgtgtaatcgaaaaatgtaaaattttttgtacgagaagtgattgctcttggttgagctgatggtaaggagagagtttaaaacttgcttgattattcaatatttattcacctcgttttcaattataatgaatagaaataataatgataaaggaagaaaacatgactgcacaaaaaataattcacaatcggctatttttaagacaaaaatctgatttagctggcaaaaatgatttacaagttgcgataaacttgcgtgatacgctactagctaatcgtgggaaagctgcggggctggctgcaaatatgattggtcagactaaacaaattattgcgttttatgctggcccgcttccatttgtaatgctgaatccgcgtattattcaaaaaaagcagatgtatcttgctagtgagggatgtctgtcactagaaggcgagcgtaatgttcagcgctatgaagaaattactgttacttatcagaatatggagttagaaacagtaacgcaaacttttggtgactttatagctgaaacgattcagcatgaaattgatcattgcaatggaattctgatttgaatagtagaatatttacgtgattttgcaaaaaaagtaaaaaaatttaaattaattttgcatggtttcagggatgaaaacccacaattttcgaataattagatttgatagaataaaatactttttaatttaatgcaaagataaagaaaaatatattacaacactacctagtgtatcgtgaagaacccgaacgaagagcaagacttgccaaagcggagaaaataaggtaaattaataaagtcgcttcgagagatgcgacgagagcttaaaaacagacatgcaaggaaagaaaacaaataaaaagaaaaaagtacttgcaaagaagtaaataagctggtaatatatttaaatgtcgtcaggtgaaagcagaaaaagcttgagtaagacgaaaaaacaaatcaaaaaagttcttgacaaagaaatgatggtttgataaaatataaaagctgtctgctttgcaaaaaaagcaagacagaggtagtactttgaaaactgaacaaagtttcgctaaaagtgtgcgggtgtaaaaacccaaacaagaagcgaagtcaattcgcaagcaataaatttgagacaaagatcttaaataaggaatgagcaatcattcaaactttttaaaatgagagtttgatcctggctcaggacgaacgctggcggcgtgcctaatacatgcaagtcgagcgagcggaactaacagatttacttcggtaatgacgttaggaaagcgagcggcggatgggtgagtaacacgtggggaacctgccccatagtctgggataccacttggaaacaggtgctaataccggataagaaagcagatcgcatgatcagcttttaaaaggcggcgtaagctgtcgctatgggatggccccgcggtgcattagctagttggtaaggtaaaggcttaccaaggcgatgatgcatagccgagttgagagactgatcggccacattgggactgagacacggcccaaactcctacgggaggcagcagtagggaatcttccacaatggacgcaagtctgatggagcaacgccgcgtgagtgaagaaggttttcggatcgtaaagctctgttgttggtgaagaaggatagaggtagtaactggcctttatttgacggtaatcaaccagaaagtcacggctaactacgtgccagcagccgcggtaatacgtaggtggcaagcgttgtccggatttattgggcgtaaagcgagcgcaggcggaagaataagtctgatgtgaaagccctcggcttaaccgaggaactgcatcggaaactgtttttcttgagtgcagaagaggagagtggaactccatgtgtagcggtggaatgcgtagatatatggaagaacaccagtggcgaaggcggctctctggtctgcaactgacgctgaggctcgaaagcatgggtagcgaacaggattagataccctggtagtccatgccgtaaacgatgagtgctaagtgttgggaggtttccgcctctcagtgctgcagctaacgcattaagcactccgcctggggagtacgaccgcaaggttgaaactcaaaggaattgacgggggcccgcacaagcggtggagcatgtggtttaattcgaagcaacgcgaagaaccttaccaggtcttgacatctagtgccatttgtagagatacaaagttcccttcggggacgctaagacaggtggtgcatggctgtcgtcagctcgtgtcgtgagatgttgggttaagtcccgcaacgagcgcaacccttgttattagttgccagcattaagttgggcactctaatgagactgccggtgacaaaccggaggaaggtggggatgacgtcaagtcatcatgccccttatgacctgggctacacacgtgctacaatgggcagtacaacgagaagcgagcctgcgaaggcaagcgaatctctgaaagctgttctcagttcggactgcagtctgcaactcgactgcacgaagctggaatcgctagtaatcgcggatcagcacgccgcggtgaatacgttcccgggccttgtacacaccgcccgtcacaccatgggagtctgcaatgcccaaagccggtggcctaaccttcgggaaggagccgtctaaggcagggcagatgactggggtgaagtcgtaacaaggtagccgtaggagaacctgcggctggatcacctcctttctaaggaagcgaaggatatggagagcaggaatgctaagagaagtatccagagcaagcggaagcacactgagaaactttgtttagttttgagggtagtacctcaaaaagagctagtacattgaaaactgaatataatccaagcaaaaaaccaagacaatcaaagagaacagattgtagagcgaccgagaagagaattcttgagtaaggtcaagtagaaaagggcgcacggtgaatgcctaggcactaacagccgaagaaggacgtgacgaactacgaaaagcttcggggagcggtaagtacgcagtgatccggagatatccgaatgggggaacccaatgcagagatgcattattgattagtgaatagatagctaatcaaaggaagacgcagtgaactgaaacatctaagtagctgcaggaagagaaagaaagatcgatttccttagtagcggcgagcgaagaggaaagagcccaaaccaagtgatttatcatttggggttgtaggactgcgacgtggcagtgtaagagatagttgaattatctgggaaggtaagccagagagggtgagagccccgtaagcgaaatctcaagcacgcctagcagaatcctgagtaggccgggacacgaggaatcccggttgaaaccgcgaggaccatctcgcaaggctaaatactagttagtgaccgatagtgaaccagtaccgtgagggaaaggtgaaaagaaccccggaaggggagtgaaaaagaacctgaaaccgtgtgtctacaagtagtcaaagcacattaaagtgcaatggcgtgccttttgtagaatgaaccggcgagttacgttatctagcgaggttaagtcagaaaagacggagccggagcgaaagcgagtcttaatagggcgaaaagttaggtgacgtagacccgaaaccaagtgacctacccatgaccaggctgaaggtgtggtaaaacgcactggagggccgaacccacgtaagttaaaaattgcggggatgagttgtgggtagcggtgaaattccaaacgaacttggagatagctggttctctccgaaatagctttagggctagcctcgtggagaggataatggaggtagagctctgtttggactaggggcccgtcaggggttactgaatccagataaactacgaattccagatatccatacacgggagtcagactgcgagtgataagatccgtagtcgaaagggaaacagcccagatcaccagttaaggtccccaaatctatgctaagtggaaaaggatgtggagttgcgtagacaactaggacgttggctcagaagcagccatcattcaaagagtgcgtaatagctcactagtcgagtggcgctgcgccgaaaatttaccggggctaagcatagtaccgaaactgtggatgtgttttaaagagcacgtggtaggagagcgttctaagagcggagaagttgaatcgagaggatcaatggagcgcttagaagtgagaatgccggtatgagtagcgaaagataggtgagaatcctatccgccgaaagactaaggtttcctggggcaggctcgtccgcccagggtaagtcgggacctaaggcaaggccgagaggcgtagtcgatggataacaggtagagattcctgtactgtgtcaaatcgttaagagcgaaggagggacgcaggaggtgaagcacgcatcgcgatggaacgatgttcaagcaacaagtgcggttaagagtcaaatgcttctaaccagcaacacgagttgtgaagaggagtgaattaaaagtagcgaaggtgtggtaatcacactgccaagaaaagcttctagccagagatgacatacccgtaccgcaaaccgacacaggtagtcgagtggagaacactaaggtgagcgagagaactctcgttaaggaactcggcaaaatgaccccgtaacttcggaagaaggggtgctagccaagagattggttagccgcagtgaataggcccaaacaactgtttatcaaaaacacaggtctctgcaaaatcgtaagatgacgtatagaggctgacacctgcccggtgctggaaggttaagaggagagcttagcgtaagcgaaggtttgaattgaagccccagtaaacggcggccgtaactataacggtcctaaggtagcgaaattccttgtcgggtaagttccgacctgcacgaaaggtgtaatgatttgggcactgtctcaacgagagactcggtgaaattataatacccgtgaagatgcgggttacccgcgacaggacggaaagaccccatggagcttcactgtagcttgatattgagtatcttttaaacatgtacaggataggtaggagccagagaagataggacgctagtcttattggaggcaatgttgggatactacccttgtttgaaggatgctctaacctcgacctgtaagccaggccagggacagtgtcaggtgggcagtttgactggggcggtcgcctcctaaagtgtaacggaggcgctcaaaggttccctcagaatggttggaaatcattcgcagagtgtaaaggtataagggagcttgactgcgagagagacaactcgagcaggtaggaaactaggacttagtgatctggtggtaccgtatggaagggccatcactcaacggataaaagctaccctggggataacaggcttatctcccccaagagttcacatcgacggggaggtttggcacctcgatgtcggctcgtcgcatcctggggctgaagtcggtcccaagggttgggctgttcgcccattaaagcggcacgcgagctgggttcagaacgtcgtgagacagttcggtccctatccgtcgtgggcgtaggaaatttgagaggagctgtccttagtacgagaggaccgggatggacgcaccgctggtgtaccagttgttccgccaggagcatcgctgggtagctatgtgcggaagggataagcgctgaaagcatctaagtgcgaagcccccctcaagatgagatttcctttgcgtaagcagtaagacacctcagagacgatgaggtagataggctgggagtggaagtcctgtgaaggatggagcggaccagtactaatcagtcgaggacttgaccaaagcgaagcaaactggaaggttttttgcgagaaggattatgtttagttttgagtgtaaaagctcaaaagagtacggtggcgaaagcaagaaggatacacctgttcccatgccgaacacagaagttaagcttcttaacgccgaaagtagttggtgggcaactgcctgcgaggaaaggaagctgccgtgctcttttttaatattccggcttagctcagttggtagagcgcttgactgttaatcaagatgtcgtcagttcgagtctgacagccggagtaaaggggagaaggaagcggaagacttccttttttgtgccttttgggtatgttaaaaggctaattaggctaagcaagcatgacttgagggtcaaatttaatataatcattaatagaagacatagtaaaattcctaacaagcttaattgaattgattacggaggctatgctctctttttaagtgcataaaaatcttatagatagatacgcgtggtgctagttaaatcgttctagacaataagccaaattataagctaaaattgcaatttccaaccggctttgaaagcctatcagactacgtgctcgattgttctcggcattgtaataggtcagaagcgaaaagtcgctttcaattgttctgcgaatagccatcaattgatgatcattgtgctttttagctcctgtcatatttttacgatatggtgtccaaagttcgtaacccatttgttttagctgttgatgcagttctttgcctaaatagccttcgtcgccaagaagatagtaattagatggatgggtattttctatcagttcaactgtctccctggcatcatgaactgatgcctttgttacgacataatcaagaatgtaaccgtcatcgctaacaatggcatgaactttgaaaccatagaagtaaattttcttggtggccttataaccaatgttggcataaccgcgaaaaattttagcacgatagtttcgaattggttggcaaacaggtaccggaaagctgtcaatgatcaagaactgtccattcaggtcaacctttttattcatttcttgccgtatctgataaatcaattgcaatagctgacgtgaacgccgattaaaacgtgagtgtgataaacaattgaaacattcacagaatcttctttgtgattcaattcctgtcttagcttgccagataagtaaagccaaaatcagactgtccgtagttttaatttgatcaatatttcgccgatgagtaaactcagccggtgcatacaaacgataccagtgccgacaaattatcactaaatctttaaaactaacttgtaaatggtggctaaaacgcttaagcttaaggcagttcaatcagatcagactcttttctattattactatttacaagtcgagtctaacaagattggacttttttattaactaaaacgatttaactagcaccacgcgtagatagattattataaatacgcgtggtgctagttaaatcgttctaggcaatatgccatattataagctaaaatggctatttctagccgctgctgaaaaccagctaagcaaagaaaagtcgctctcaattgttcttctaattgccatcagttgatgatcgttatgctttttagcgcctttcatgtttcttcgatatggtgtccaaaggacatagcccataccttttaactcggcagttaagtcttttcctaagtagccttcatcgcctaaaagataatggttaattggatgagcattaatcatcaattctgtcgtttctttggcatcatgcactgatgctttagttcaagtacatagccatcatcgcttactagcgcgtgaaccttgaagccgtaataatagatttttttagtggctttctagccgatatcagctatgccacgaaagatcttgacgcgatagttgcggataggctgacaaactgggaaactgtcaataattaagaattctccagctgtttttacttcttgattccaatcttgacggatacagcgcattaaaggcaaaagcattcgtgcccgacgattaaagcgagaatgagacaaaccgacaaagaatttacaaaatcttctttgagattcgataccaatttcagtttgccaaataagcatcgctaagatggagctgtcagaaattttaacctgatcaacatttttacggtgcttcaattcatcaggagcacaaagcttgtacaaagaacgacaaattacatttaaccgagcaaagctaacttgtaaatggtgagaaaaacgattaagcttgagatagttcaattagatcggactcttttctatttaatttaagttacaacttgagtctaatccgattggacttttttattaactagcaccacgcgtttataaatattcaacgacagtaaaattaggtaagcaatctatatctaggaatctgttggggttctgattgtagtaggctaattatacaaaaatgagttaacaaaattctgatcagaattagtacggttaagattgaaaaaatagctggtaattattactgtatctctttgtaattaggtagcaatgctattttttacttctaaaatataattaaaccggtcagacaattcgtattgatctgaatttggataaacagttataacaaaactatgtgtgcaaagcagatgacaggggcttttaattgatctcgtatgttggagcgcgctgtgttgactatttgttctaagtgaacagatgataagtatgcctctatctaagtaccaagatctaggaaattcattctgaagtagttaatatgtgtcaatatgtcgcacaaaggtaactatgaattacagcaacataagagaaatttgaaaaatagtttttaaattgtggcttgttattagtgaaaatgataaattaaatattattttggcagaaaatacagcttaataacaaaaaataaaaatattttttgcttacctttaaaaatatagttcgagatttataaagtttttaacgagttaaagtgatatttctataattgaaagcagattctactaatgtaattactataatcagaataaatatttcataaaaatacatagaacccgaacgaagagcaagacttgccaaagcggagaaaataaggtaaattaataaagtcgcttcgagagatgcgacgagagcttaaaaacagacatgcaaggaaagaaaacaaataaaaagaaaaaagtacttgcaaagaagtaaataagctggtaatatatttaaatgtcgtcaggtgaaagcagaaaaagcttgagtaagacgaaaaaacaaatcaaaaaagttcttgacaaagaaatgatggtttgataaaatataaaagctgtctgctttgcaaaaaaagcaagacagaggtagtactttgaaaactgaacaaagtttcgctaaaagtgtgcgggtgtaaaaacccaaacaagaagcgaagtcaattcgcaagcaataaatttgagacaaagatcttaaataaggaatgagcaatcattcaaactttttaaaatgagagtttgatcctggctcaggacgaacgctggcggcgtgcctaatacatgcaagtcgagcgagcggaactaacagatttacttcggtaatgacgttaggaaagcgagcggcggatgggtgagtaacacgtggggaacctgccccatagtctgggataccacttggaaacaggtgctaataccggataagaaagcagatcgcatgatcagcttttaaaaggcggcgtaagctgtcgctatgggatggccccgcggtgcattagctagttggtaaggtaaaggcttaccaaggcgatgatgcatagccgagttgagagactgatcggccacattgggactgagacacggcccaaactcctacgggaggcagcagtagggaatcttccacaatggacgcaagtctgatggagcaacgccgcgtgagtgaagaaggttttcggatcgtaaagctctgttgttggtgaagaaggatagaggtagtaactggcctttatttgacggtaatcaaccagaaagtcacggctaactacgtgccagcagccgcggtaatacgtaggtggcaagcgttgtccggatttattgggcgtaaagcgagcgcaggcggaagaataagtctgatgtgaaagccctcggcttaaccgaggaactgcatcggaaactgtttttcttgagtgcagaagaggagagtggaactccatgtgtagcggtggaatgcgtagatatatggaagaacaccagtggcgaaggcggctctctggtctgcaactgacgctgaggctcgaaagcatgggtagcgaacaggattagataccctggtagtccatgccgtaaacgatgagtgctaagtgttgggaggtttccgcctctcagtgctgcagctaacgcattaagcactccgcctggggagtacgaccgcaaggttgaaactcaaaggaattgacgggggcccgcacaagcggtggagcatgtggtttaattcgaagcaacgcgaagaaccttaccaggtcttgacatctagtgccatttgtagagatacaaagttcccttcggggacgctaagacaggtggtgcatggctgtcgtcagctcgtgtcgtgagatgttgggttaagtcccgcaacgagcgcaacccttgttattagttgccagcattaagttgggcactctaatgagactgccggtgacaaaccggaggaaggtggggatgacgtcaagtcatcatgccccttatgacctgggctacacacgtgctacaatgggcagtacaacgagaagcgagcctgcgaaggcaagcgaatctctgaaagctgttctcagttcggactgcagtctgcaactcgactgcacgaagctggaatcgctagtaatcgcggatcagcacgccgcggtgaatacgttcccgggccttgtacacaccgcccgtcacaccatgggagtctgcaatgcccaaagccggtggcctaaccttcgggaaggagccgtctaaggcagggcagatgactggggtgaagtcgtaacaaggtagccgtaggagaacctgcggctggatcacctcctttctaaggaagcgaaggatatggagagcaggaatgctaagagaagtatccagagcaagcggaagcacactgagaaactttgtttagttttgagggtagtacctcaaagatttgaaaaacgccaagcgttagtcgggcctatagctcagctggtttagagcgcacgcctgataagcgtgaggtcgatggttcaagtccatttaggcccattgacataacgaagaaaaagagttaaagttatgtctggccgaaaataaaatactctgggggcttagctcagttgggagagcacctgctttgcacgcaggaggtcatcggttcgaacccgttagcctccattgatccagaaaaaggatcaaagagctagtacattgaaaactgaatataatccaagcaaaaaaacgagacaatcaaagagaacagattgtagagcgaccgagaagagaattcttgagtaaggtcaagtagaaaagggcgcacggtgaatgcctaggcactaacagccgaagaaggacgtgacgaactacgaaaagcttcggggagcggtaagtacgcagtgatccggagatatccgaatggggggaacccaatgcagagatgcattattgattagtgaatagatagctaatcaaaggaagacgcagtgaactgaaacatctaagtagctgcaggaagagaaagaaagatcgatttccttagtagcggcgagcgaagaggaaagagcccaaaccaagtgatttatcatttggggttgtaggactgcgacgtggcagtgtaagagatagttgaattatctgggaaggtaagccagagagggtgagagccccgtaagcgaaatctcaagcacgcctagcagaatcctgagtaggccgggacacgaggaatcccggttgaaaccgcgaggaccatctcgcaaggctaaatactagttagtgaccgatagtgaaccagtaccgtgagggaaaggtgaaaagaaccccggaaggggagtgaaaaagaacctgaaaccgtgtgtctacaagtagtcaaagcacattaaagtgcaatggcgtgccttttgtagaatgaaccggcgagttacgttatctagcgaggttaagtcagaaaagacggagccggagcgaaagcgagtcttaatagggcgaaaagttaggtgacgtagacccgaaaccaagtgacctacccatgaccaggctgaaggtgtggtaaaacgcactggagggccgaacccacgtaagttaaaaattgcggggatgagttgtgggtagcggtgaaattccaaacgaacttggagatagctggttctctccgaaatagctttagggctagcctcgtggagaggataatggaggtagagctctgtttggactaggggcccgtcaggggttactgaatccagataaactacgaattccagatatccatacacgggagtcagactgcgagtgataagatccgtagtcgaaagggaaacagcccagatcaccagttaaggtccccaaatctatgctaagtggaaaaggatgtggagttgcgtagacaactaggacgttggctcagaagcagccatcattcaaagagtgcgtaatagctcactagtcgagtggcgctgcgccgaaaatttaccggggctaagcatagtaccgaaactgtggatgtgttttaaagagcacgtggtaggagagcgttctaagagcggagaagttgaatcgagaggatcaatggagcgcttagaagtgagaatgccggtatgagtagcgaaagataggtgagaatcctatccgccgaaagactaaggtttcctggggcaggctcgtccgcccagggtaagtcgggacctaaggcaaggccgagaggcgtagtcgatggataacaggtagagattcctgtactgtgtcaaatcgttaagagcgaaggagggacgcaggaggtgaagcacgcatcgcgatggaacgatgttcaagcaacaagtgcggttaagagtcaaatgcttctaaccagcaacacgagttgtgaagaggagtgaattaaaagtagcgaaggtgtggtaatcacactgccaagaaaagcttctagccagagatgacatacccgtaccgcaaaccgacacaggtagtcgagtggagaacactaaggtgagcgagagaactctcgttaaggaactcggcaaaatgaccccgtaacttcggaagaaggggtgctagccaagagattggttagccgcagtgaataggcccaaacaactgtttatcaaaaacacaggtctctgcaaaatcgtaagatgacgtatagaggctgacacctgcccggtgctggaaggttaagaggagagcttagcgtaagcgaaggtttgaattgaagccccagtaaacggcggccgtaactataacggtcctaaggtagcgaaattccttgtcgggtaagttccgacctgcacgaaaggtgtaatgatttgggcactgtctcaacgagagactcggtgaaattataatacccgtgaagatgcgggttacccgcgacaggacggaaagaccccatggagcttcactgtagcttgatattgagtatcttttaaacatgtacaggataggtaggagccagagaagataggacgctagtcttattggaggcaatgttgggatactacccttgtttgaaggatgctctaacctcgacctgtaagccaggccagggacagtgtcaggtgggcagtttgactggggcggtcgcctcctaaagtgtaacggaggcgctcaaaggttccctcagaatggttggaaatcattcgcagagtgtaaaggtataagggagcttgactgcgagagagacaactcgagcaggtaggaaactaggacttagtgatctggtggtaccgtatggaagggccatcactcaacggataaaagctaccctggggataacaggcttatctcccccaagagttcacatcgacggggaggtttggcacctcgatgtcggctcgtcgcatcctggggctgaagtcggtcccaagggttgggctgttcgcccattaaagcggcacgcgagctgggttcagaacgtcgtgagacagttcggtccctatccgtcgtgggcgtaggaaatttgagaggagctgtccttagtacgagaggaccgggatggacgcaccgctggtgtaccagttgttccgccaggagcatcgctgggtagctatgtgcggaagggataagcgctgaaagcatctaagtgcgaagcccccctcaagatgagatttcctttgcgtaagcagtaagacacctcagagacgatgaggtagataggctgggagtggaagtcctgtgaaggatggagcggaccagtactaatcagtcgaggacttgaccaaagcgaagcaaactggaaggttttttgcgagaaggattatgtttagttttgagtgtaaaagctcaaaagagtacggtggcgaaagcaagaaggatacacctgttcccatgccgaacacagaagttaagcttcttaacgccgaaagtagttggtgggcaactgcctgcgaggaaaggaagctgccgtgctcttttttaatattccggcttagctcagttggtagagcgcttgactgttaatcaagatgtcgtcagttcgagtctgacagccggagctagcggaatatgaaagaggcgggggccagaggcttccgcctttttgtgtgctattaaagttctataattaagcttttctaagtcttgaaatttttttaaatagggtttccaaggaactttgaggagtttgtactctgaatggtattgatggatacgttattttttctgccggaaagccacagaatggacaagtgggctgctttaaaagggcttcgtagactttgtattgcactccattgaagaatttatagaaattgttgtaaaaaacgatatttttatctttaatatcgagatcaaatttaatacaatcattaacagaggacatagcacaactcctaaatagcttaattgagacagaatatcataaatattcatcaacaggaaaaattatagagctaataaagaagttatagctttttatttgcgttatgaaatgtataaacttgttgtctttgtctctctattagactggtaaatattcaaaagtatatgttaaatttcagacattaaatacttagaaaaaaggacatatttagatggataaaaattctgatagacttacgttagtgccatatttcccgaatgaaaagcagactcttaaatggtaccaggatcctaaaatctgtaagcaggtagataatattgataccgtttatgatttaactaaattacgtcgaatgtatgaatatttgtcagtgcatgggtggtgctactatattcaatatcaagggaaattgattggtgattgtactttgctaaaagacggtgagatatcaatcgtgatttgcaaagaatatcaaaacttgcatcttggtagaaaatgtgtcgacaaattggtgcagcttgcaagaattcagaaaatgacgcaagtgaaggctcacatatatgactttaatattcaaagcaaaaaaatgtttacaagaatggggtttaaagagcaacaacctgactggtactcttatgatttatagatcaaaaatattcatgttaccaagtaattcatacaaacaatcagttggtgtgatgtcagataagcactcgtattagaaaaatgtaatcatcagtaattaaagactgtagttgaatcaaataattaactcagcgtataaaatgctgagttagacaaaaaaacaacgagcaattctctcgttgttttatggattcattttgatcaaatttttagtttatctttagttgtaaataccaacttgattaatgtgggccaattccagaactggagattgagcgaggtccaaactaacatcacagccagcatggataccattattttcgccattaagccagtgggtattattagttacgtcatagacagtaccattaaatgcaatataagctggacgtccatttttaccattgtaatttgatagagtttctttagtaaattttctcatataagaagctcctttctaataagatcttgatatattaatggtaacactttgtcaccttatagcaagagatacgaaggagtcttatgcttttcttatgaaagatgaccacgccacccagcaatatcccaatctagaaagtcataattaagctttttaccataaattttctcgtaggcagcaactttttgtcggtagtcgagttccatcatcttatgagcgttttcgttggcgtttagagaaacgtcagggaagattggtggtaaaacatggacaatatatttggtctcataaaaattaggatctttcttttcgattttaggtagatccttaatctcgacaaaagtggagactaccggtacattttgtttagccgcaaaataataggcaccacgttgtaatttgcgaggcttgcgataattccaccacatctcctgttctggataaattaaaacccaattatttttagctaaagctgcactgaggtgcttaggaaattcatttccaatatagctaggactctgaactagtggaatagtgccaacataattcattaaatagcggaaaaatcccggtagcattaggttagtatcttcaattacaattgaaagctgatggtgcatcttgttagcgagcagcttcattggtaaagaatcaacctgattgtagtggttagaagttaaaattgcgccaccaataggtaaattatttaggttctctaaacctacaaattcagttgatccagctaatgctctggataaagtaccaaataagagatgtccaatacgattattaagcttacttgaaaaagtgttacgcttattccaataatcattgaccaatttaaggcgctgatctagggacatttggggatcgccgatttctacttttgctgtgaagttacgttcattagcagctttttttatatttttaatcactgcctcacgattatcgccaaaaatcatagtgttactgcctctcgtttcttaacttttgcccaattattaggatcttgctcagttttgtcttccttagcaagcatatgatccaatttttcgcggtctgctgcacgctcgtcatcagtataattattgagttcgttctttaattcatcgaaaaactgcgtttgtttggcactatcccagaagtactgtgcatattggacattagcaaaatgccatggcttaaagaaaagattatagtgaatcagaccaggattagttaaaggttcagtgttttcatttggcatagcatcccagcgaggatttaagtgcaaaattctgccttccccgatttcatttaaatagtcttgatcaggagcaatacaatcaaaatgatacttttctaaaagtgtcataaaatggtcaataaaatgttcagcgcgaaaggccctagcattcatgacgagcatgccagagttaatgtatttcttggggtcaagtgccaggacatttttgatgtattttatcatcttgtctacatattgaattgaggagtcggtgcaagcagcaaataaattatcacccaattcggagttgtatagtttagcaagatcgtcgtttacaattgtgtcgctatcaatatagatcaccttatcatattcgggaaaaagttctggaataaagaggcgataaaaaatcgacatggtaaaaaagtcagcgcgaagaaagttttccttacgattttgaataggttgtacaagttgatcatcaatatggaaaaacttcacatgaacgtttgaactgctaagatcagacaaagctttttgatgctttgatgagagatcttgatttaaaaagtaaacagtataatccttatttggatctgtatgtttgactaaagaattaagagaaacagcagcgtatttggtaaagtcatcgctgatactgtaaaaaataggaattgtcataaaattacctttcttagattttaactgattccgtttgtttaaccttagcccaggtatttggctctttgacaatcatgtcaacttttttggccatccattctaggttagctcgggccttttgacggtcttcatcagtaaagttgtctaattgctgctttagttcatcgtaatacggcgtagttttagcaacataccagaaataatgaccatattgaacatcagcaaaatgccatggtttgaagaaaagattgtagtgcacgatcttaggatcttgaatttcaggaatgctttcatttggcatagcatcccattctttaggtaggtgataaatcttatcttcgcaaatttcattcatgtaggcttgatcagggtcaacgttatcgaaatgatatttattcattaagtaatagaatttatcaacaaactttttgtctctaaaggccttcatattaaacagaattacaccattattgatgtatttttctgcaggaaaaattccctgacattctttaatgtacttttgtaaaagtggcatgtaacgaattgataagtcgggacatgaagcaaacatgttgtcggcgatatcaatttcatacattttagcaatatcagtacagataatagtatctgcatcaagataaactgccttgtcatattgagggaacaattctggaatgaatagtcggtaaaaaattgacatagtaaagaattgagcacgcaagtagttttccttagtattgtgaattggcttaaccatgtcatcgtcaatatgaaagatttgaacatgaatattatcagttgaaagatcttctaagctctttttgtgctcatcagatatctgttggactaaaagggtaatcgtatagtccttcttggggtcagtatggtcaattaatgatttaattgaaacatatgcatatggcgtataattatcgctaattgtgtaaaaaacaggaatggttttcaaaataagatcctcctaaattatttttttaaattatttcgtaatttgagatattcgttaagcaaatcatcatattcatgtaaatgaagtacactgtgtacgcgatcaacatcccatggcttaactgtttgagtatggaaataaggccaaaacctaaagctagtagtgaaatgttgaattttggtgtttttttgcaaatgatattgctcattataacggcgtggtgctactcgcttggctacagctagcttgtttattgctgattggtcgggcaaaaacatttgcttaacctgcatcatatgccgcacctcggcaaagagatcagtttgcttaattttcttcatattcagcaacaaaacgccagaattaagataatcaaatgcgcgcttggtcttaagattgtggaagaagaagcggccccaataatcaagtacgcccactaattcgattccggtaatatcctcattgtaaaaagttgtaatatcaccgcgaatgacaatgtcatcgtctaaataaagaatgcgatcaggaatctgtggcaattggtctgcaaataaacgcaacatagcatatggcgtgaagcgagtattcatgttagcggttggcggttcctgttcaaataacttggtgcagtcaattaattcaactgtactgttaggattggctttttttactaaagaacgtaaaaaatcagccgcatgttgtgagaaagggtgatatttacgttcatcactgtgtgcctccatcgttaaaatataaagatgcaattcttgagcaccagaatttttgattaaagataaggtggaaatcaaaacgccatcttgagcattttcatctccacaaaaaagaatattcatgataaactcctattttttatttcttttgaatatattgacaatattcataatcgctattttttgcacgctgcttcattacctgccaaatttcatcgtgaagcttattttgagcttccttacggcttaaatttgtatccgggtaaaagggcccatcaatgtaaataacggcactaggccgcttgctaagccactttttatggtaggttttggtcatgacgaaactaggcgcatttaatttaactggaaagtgcatgcttgttgcatcgaacgggcgaatcttcgtgtaatagggccagacatgagcttcagggtagatgagaatctcgccctttttatccttaatcacagtttgaatggctttaattagtttgagcgattgcttcatatttttgccaacaggcagaccgccgtagcgtacaagatatttgccaatgaaggggatgccccagttagcttgattagcaatagcataaaaatttttgattggaaaaattgtgagcgaggtaaagacatcccccatgggtctagtatggttgccataaataaaatagcccccattgacttgcttaagtttttcttgaccaacgacttttacatgatcgaagaagcggaaaaccacccaaccaaaagcgcatgctaagtgacaagcggtagtggaccagattctagctccaagagaattaggtagaataacgtaattatcgggtagactgaaattttgatcgtgactatcgactacatcatcggttgttttttggtaataataaatccgtttcatcttgccctccatgatacttatgtatcctatgataccatggaaaaaagcctaattcctaagacgagaggaatgctgaaagaaaataaaaaagattcgtaatttcatgatcgaaaaatacgaatcctctgtaaaatagcataaaaaaagcaccgccttcttgcagtgcatctttcatattatgggtggccaggggatcgaaccctggacccacggattaagagtccgttgctctgccagctgagctagccacccatatttgttcatcagctcccgccgacatttaaatatattaccagtagttttataatttgacaagctttttttgaaaaaagttgaaaaataatttgaagctagcaaaaagcgcccataatggccgcttttttactaaagtttatcttgaatatgataggctgtgccttgctgatcctgcttcatgtgatctgcatagtaaacagcatagacaccgctttgatcatttttggcaatcacaatttggcgccctgttggacgttctgccttaatgatttgagcactgcggcgtgcttctttaaagtcgtgtgaagatgcgatggcatcccctggattaaaaaatacagcttcgttcattgtaaagccccctcgtacaaattctaattttattttaccaataaagccctttctaaatccaatttaagaaacaaaaaagagataagatcaacatcttatctcttacgaaaaatattatgggtggccaggggatcgaaccctggacccacggattaagagtccgttgctctgccagctgagctagccacccatgtcgttgaatcaatcaacagatattattatgctattgttgataagaaaatgcaagctttttttgaaaaaaaacaaaaatttttggctaatgttacaaaattcagtataatgtaagggcaaaggaggcattcccgatgccaaagaagattctcgtcgtcgacgatgaaaagccgatttctgatattatcaaatttaatttaactaaggaaggctttgatgtcgacaccgcctatgatggcgaagaagctgttaaaaaagttgacgaatacgacccggatctaatgattctggatttgatgttgcccaaaaaagatgggttggaagttgcgcgtgaagttcgtcaaacgcatgacatgccaattatcatggtaactgctaaagatactgaaattgataaagtcttaggactggaaatgggtgcagatgactacgtaaccaagccgttttctaaccgggaattagttgcccgtgtgaaggctaacctgcgtcgtcgtgatattgttaaaaaagcagaagctgccagccaagaagagaccgataagaatattaagatcggtaacttggtcattatgccagatgcctatattgtagaaaaaaatggtaagaagattgaacttactcaccgtgaatttgaacttctttactatttagctcaacatatgggacaagttatgactcgtgaacacctgcttcagactgtttggggttatgactacttcggtgatgtgcggactgtagacgtaacggtgcaccgtttaagagaaaagattgaagataatccaatccaacctcaaattttagttacccgtcgtggtgttggctattatgtaaaacagccgagtgaagaataataaagaaagccacagaactgttatggtagtggctttcttttttatattttttagatattgaatgagtagaatgaaaaaattcaaagcaagattaaatagtacatttaattccattaatactaaaattgcaattgtgttcatgctgatgctactggcaacaattgaagttattggagcttattttacccgtcaattagagcaaaatagcattgaaaatttccaatcatcaatccagattcagactatcgtcagcaatcagttagctaatcagttgaccagtgataataaaaatactaatgatcgcttgaatcaaattgttaatgactacaataatgatgcaattagtgaaattattgttgtcgataataaggatacgattcgtgccgtttctaacttaaatgataaaagtaagatcggtcaacggattaacaatactgatgtgaagcaggttatttcaactggacatcaaattaataaagtggtcgatgatcatggcaattacatgattcaaatatcgccgttgactagtggcaatggctctaacaatactgttggtgctgtctatgttaaagctagtatgcaagatgtctttaacaatttgcgccaaatttcattgactttcttgattgcgtcattgatcgcggctttattaggtgcatttttgtcattagttatttcccgggcaattacgcaaccgatcgaagaaatgcagaaacaagcattgcatattgctgatggtgattattcaagtcaggtaaaaatttattccaatgatgaactagggcaattagctaaagcatttaataccctgtccgtacgaattgaacgctcacaagaagagtctgatagtgaacggcggcgactagatagtgttctgtcacacatgagcgatggagttctagccactgatcgtcatggtaacgtcagtgtggttaatcatatggcactaaactttttaaataaaaaagaagacgaggttatcaataagccgattgctgaagtactgggactagaagatacttcgtcacaagatttgatttctagtcaaaaagagatcgttattacccttgatccaggtacgcgggatgaaattattttgcatgctagtttttctttgattaagcgggtaactggctttgtatcagggtcagtttgtgtattacacgatgtaactgagcaacaaaagaatgaagattcacaaagacagtttgtttctaatgtctcacacgaattgagaacacctttaacaagtttgcaggcttatattgaagctcttaatgagggtgcttggaagaatccagagattgctcctaagtttttggaagttacccaacaagaaactagtcggatgattagaatgatcaatgacttgttgagtttgtctagaatggaccgtggcgtttcaaaaatggatctagaatttgttaacttaaacgattttgttaaccatattcttaaccgtttcgatatgattgttaaaacagataaaaataaagaaaagaagaaatacacaattaagcgtgaattaggcagtcaagccttatgggtggaaatcgataccgataagatgatgcaggtaattgataacattatgaacaatgcaattaagtattcacctgatggcggtgtaattactgttagaatgacccaaaaccaaaatcatgttatcttaagtatttctgaccagggcttgggtattccaagaaaagatctgggtaaaatctttgaccgcttttaccgagttgataaggcacgttcccgggcccaaggtggtaccggcttgggcttggccattgctaaagaaattgtggaagctcaccatggtaaaatttgggctgacagtagcgaaggcaaggggtctactttctatatttccttgccatatgaaccgatgacagaggaggatgattgggatgaagtttaaattcaaattcggtgaatttttcttaggcttagctacactgatcgtcattgtcctctcaattgtgctttggatctttattatgactagtgatcagcgctttagtaatattggtcagcaaaatcaaaataatatcactaaagagcaaacgcgtagtcacaattttaagtcattatatgatttatatattccaactacttcatatggttttgctaatggaaatttgtgtcagctatatgattcaaaaaataatttgactttagaatttaccaaagagataaaaaaagccaaggccactaataaaattaagaaaatagttgatactagaactaaatatgaagagtatttaaacaatcccaactatgtgcagttggtttatccagatgaaattactttctccttatttaaccagttgaataatgccgcaaatgataaccgcgagtttaaccgcttctttatctcgcagtcaaatcactggatttatttgggaaatgatcagactaatgaaatttatcaagtaaaaattgctggcgcaaattttgataaactacgtaaatatgcatgtaatgctaagagcaagtatccagttagattagttcgtttaaaggaaggctattcaccgttttacatcaagacaatgaatgctaaagtttatagttacttgactaatcatcaatcgtattcttactttgtttcgcgtttattaggtacatctggcgttactagtaagactaataagaatggtcaaacggtatattctttgaactactatactcgcttaagagtgccagattctaattcaggtgagcataattatctttatactcattatgaaaaaaataagatccccaatactactaaccgcttattagatagcgtttattatgttcaccaattgggtttaaccgagcaagatttacgcttctttgatgcagatggtgctaatgttagttatctaaactatattgaagggattcctgttttcttaaataagcatgatttgcaagtcaagacgaccttttcaacagattcgattaatgtggcctttaatagtgtaaacttccaaattccaattccgtttgatggtcaaactaagcggttaaaaccaacccaagatgttgttgatgaattagtcaatcacggcctaaagcaggaagatattcaacgaattatcgttggttttgctgaagaaaaggattcaagtcaccatagtttgattaacttgatcccaacgtactatatcaaagcctacgatgaatggaagagcctaggtgaatgggaaaagcaagacgtatctacctaccgtgaagctgatcagttaactgttaacgaagggggaaaatagaaatggaccataaacgaatcgaatggctatttttcgttgttttctttttaattgatatttatcttggaatcgaaattctccgttctcccgttaatttaagtaacgctgataccactactcgtagtgttgctagcatccgcaatgaaatgaagtcagacaatattgatttgcccgataagatttcggatgcaccagattctggttattatttagctaccaagaatcgtgactatctctctggcaaagttagctcgctgactaatgtaaatgcccgctattctaaaagcgataatgtgctttatggtgaaccaagacaagcagtccttttgagtaaaaaacctaaggaagctttagaacaaattgaagattttaagaatgattcgaaaaatattccttatggtaaagaattcaagtatgaacctgatatgtcgagtgaagacaattatgtttttgtgcaaaactcagattatggtgaaatttatgctaactcggcccaattgaatatcaatgtaaaagataatcagattattaattttactgaaacatatatggggcaagctagtccagtgcgtgaattacagtcaaccatcagtgcttggcgtgctgtgcgtgcgatgtacactgatcgtgagttgactaataattcgcgcgtaacgcaggtaaaattaggttactccaaactgacagaagtacgtggcagcacaatcttgttgccaacttggctggtttgggtagaaaataagacaactaaaaatatcacgatgaaacgtattaatgcatatacggcacagatgctacaatcgagtacctataatgtagaaaagtagaagggacaaaaattgaaggtttccgttttagcaagcggctcgaccggcaataccagtttaatcgttacaggccagcataaaatcctgatggatgctggcatttctggtaagaaaactaaagatttgctagccgaagttggagttgatattaacgagattgatatggcctttttaagtcatgatcataccgatcatagtggcggactcggcgtgttgatgcgccgttatcctaagatagatgcttttgccaatagtgggacttggcagtatttattggatacgaaaaaaataggtaaattaccggctgaacaaatgaatacaattgaaccaggccaaactaaaacttttggtgatgttgatattactgcctttgcaactagtcatgacgcagctgagccgcaatattatgtgtttactagtggtggtaagcgggtcgcttttttaactgatacaggttatgtatcagaagaagttgaagggacaattgaagatgctgatgcctatatgatggaatttaattatgataatatgatgctcagagatggaccatattcctgggcactgaagcagcgaattttgtcggatgtaggccatttatctaatgacgaagcagcccaggcattagttgatgtagtcacacctaaaacaaagcatatctttttagcgcatcgcagccaacataataatacggagtatttagctcacgaaacggcaaaggaaatgctgcttgagggggatgcgaatttggatgatgatgttaagattattgatacagaacctaatcagcctacaaaattagttgaaatttagcagttttcacaacattttttcatataatattcaaatttaatcggtatgattagtaaacaagatgaggggagaagcaagcatggtagaaaatcaaaataataataacaatttacaacaacctagaaaaaagaatactaatggtaaaatcattgccactgcagcgattgtcggtgtagttggtggcttgatcggtggaggcgtttcatattacgcagctgatcaaatgaataatgcatcagttaataatggtgccgctcaaactagtgtatcttcaagtagtagtaaagtttcagaaaagagtgctaagactagtggcacaatgactactgcatataatgatgtaaaaggagcggttgtttcagttattaacttaaaacgccaatcaagttctaatagtactaattcactttataatagtttattcggtaatgatgacagtgatgatagctattcatcaagcagcaagggcaagcttgagacttacagtgaaggctcaggtgtagtctacatgaaatctaatggcaagggctatatcgttactaacaaccacgttatctcaggcagtgatgctgttcaggtaatgctagctaatggcaagacagtaaatgctaaagttgttggtaaggatagtacaactgacttagctgtgctttcaattgatgctaagtatgtgactaagacggccgaatttggcgattctaagagcttacaagctggtcaaactgtcattgccgttggttcaccattaggtagtgaatatgcttctacggtaacgcaagggattatttcagcaccggctagaaccatttctacttcatcaggcaatcaacaaacggttattcaaactgatgccgcaattaacccaggtaactcaggtggtgccttggttaactcagctggtcaagtgatcgggattaactcaatgaagttagcccaatcaagtgatggtacttctgtcgaaggaatgggctttgcaattccatcaaacgaagtagttacgattgtgaacgaattagttaagaagggtaagattacccgtccacaacttggcgtaagggtaatcgcacttcaaggtattccagaaggctacagaagccgcttgaagataaattctactttgaagagtggtatttacattgcctcagtaaacaagaatagttcagctgctaatgccggaatgaagagcggcgacgttattaccaaggttgacggcaagaagattgatgatgtggcatcgttacacagcattttatacagccataaagtcggtgataccgtaaatgttaccgtgaacagaaatggtaaggatgtcaacttaaaggtaaaacttgagggtaactaaaaatcaaaatagaagttaattaaaagaaaaaaggctatatcacgcggtttaaacgtagatatagcctttttgttaactttttaaatgtgtaacatcaaattgttcggaattatttgttgtcaaacagacactagcctgttgataagtgtggataactctgtggattgtgtataacttgataaatataggtttattaacttgtggaaaaatatgatgattttgaccttatttagtgaattctatttgagaaaacaggcgttcatgcaggcataacaagccttaagagataaagtttgtgaaaaaaggctttcataaaatcgatgtgaataaagaaattttagaaaaattattaaatacaacttctggggtataagtaaaataataccacaaaatgttgaaattggtctttgaagttttgtggaaaagtttgggtaaatagtgtggaagggatgttagtattgtgctggtagattaaaattatgaatggaaaattagctatgcttgttataatagaagcatgaatatcaaaattgtatgtgttggaaaattaaaagagaagtattttagggatgcaattgcggagtatgagaaacgactcagtcgttttgcaaaggtgtccattgtacaggtgcctgatgaaaaagcaccggaaaaattcagtgcagctgaagatgagaaggttaaagagattgaaggtcagcgaatcctgagcaaaattaaagataaggagtacgtgtatgtgactgcaattaaaggaaagcagcgcagcagcgaagagttcgctaaagagattcaggatctcgcaacttatggtcattcagacattacgtttgtcattggtggcagtttagggactagcgatgctgtaaacaagaggggaaatgacttgattagttttggtaaattgacgatgccacaccagttgatgcgcgtggtgttgattgaacaaatctatcgtgcatttatgattaactcaggtagtccttatcataagtagaatatagaaaaagcccataaattgggctttttatttttgcatatttgcagatttcacaagcatattgaaaaaaactgtggcaggtcagtgcttttttagttttttatgatttaaaaatagattttgttaaattatgtttggcaacaaaaaagacgatctttcgatcgccctgataatttttgagctaccagctagtagctcacgcacacgctgaagtgtactttatctttgtagtatctcaattttaacacataaatggtaaaattaaaactgcacgctgaagggggtaagtgtcaatgtttttgcggtagcctttaaaccattagtctaaccttaatttcttaaatatttatatgacttaaatttctgcttagcttgcttaaataactattgccagctacctgtgcggttaatgcgccatgctggatgcctaaatgaacttcatgacgcttctttaagctgtcacgggccgctgcttttaattcctgttcagtcaatacagttatttctgaatcttcaaactcgctgctaagccaaaattccagctctcgattcttgatgcagcttaagatcctaagcatgccttctgctccagattttgaccatttcttgccttgccccttaacacggtaggtatacttgcggtggttgctctcgcagcagccaatggctttagtcacagtcagttttcgtttcttaaacggcttaatatcgtcccaatgacgatcaatataattccttaggcgccccagataatcatgattgagctcggtattcaattcatcaattagtcggctttctgcagtggttaggatagttttaactttgtcatagctgtatttgtattccaaagcagaaatcagcttgccttgcaggtcaggcgcaaaatatagcctttctttgattttcttatttaggtgaaagacatccaagaaatgctcatgacgcttgcatagccctacaatgtcatcgaagtctgttttggcatatccagcaccgccatcggcgttgctaagaattacagtatcagaaagatcataagtattggccaggtactccttggcttcgttcagcgcatcaagtcggcttaaagaaacaaattccttggcattgattcgctttctgcgtttcttgcttatattgacaatgccttcacagacctgatagcgatgaaattccaaccggcttttagtgcctttgatcaccacgccatcgccttcaagatacaaaactgggacctttttcttagtgcctgcggcatcatatcttgaatctgcttcttggcccgctttaatatttttcccggccatttttaccaaattgcccacctgcatatggctaatattaaagccagacaggcaattgactgctagagcagtattgcgataagtggcaacgctgcttacttctaagatgtttttgactgctaaaatactgtagcgcttgtatttgtcaaagcccattaattcatccaagggataccttgcttgtttgcctgggcagacatatcttcttctgacatacctaacttcgccaaaagccatattgattgagcgctcattcttcttatcaatctgatatccctgtgctttaaccttggtaatcatttcatcatcaactttagctaaagccaaggccatgatttccttaatcaggtttaagaagaaacagattatttttctttcacgcttaatataattatcttcagactttataatatttgcgatttcagttacaattgaattcataaaagaccagcttctaatgtgttttttgttcttaacatcagactactggtctttttgtttgagctcaagtccaaattcaaaggacttgggcttttttaattatttattcaacttaccgtaaaaaattatacacttagctgaaggggtagcgcccttactcgtgtggaaggaggtagactcaatacagccgtccttcggggcggctttttttatgatgaaaatggcaagtcattgggtgaaaagtattacgcatatcgtgcagtaactgtaaatcaaagtcccataacaattaatggcgctaaattctacaagttggctgatagggatgcttatattaaggtgaccaatattagtggtcaaggtcgcgttttaaagcgtaacgcctacatctacagtacatcaaaaaaaacgcactacgcataacggtgcttggaagttgtacaaaggctccacagtgacaacttacggtggttcatacaagtttaagaatggcaaacgctattacagaattggcggacctgctaagcaatatgtaagaacatcaaactttaattagaagttgaatatcatttacgacagcaacataatagttgctgtttttttgcctcaaaaaccatagaaaatcttctgtaatcaaggtaaaatgaaattgattttacaaatatcatggaggatgttggaatgagaaaacgatggacagcagctgttattgctgctttagttgccgtaagtactgccgcaactactgttaaggctgacgatactaacacaacagctaatactaatgagacgcaagtaactgcaactagtgaccaaactaattctgattcagataaggttacttataacaaggcagattatttgtctgctaaccctaaattagtgcgaattaagcatgcaactactgcttataaggatgctgcattgactaaatcagcacagagcgtaaaagcaggatcacactttttaattagtcgaattgttaaatctgacaaccaagtaccaatactaaagactagtgatggcttgtatttgcctgctaaaaaatctttggtaactaaggtcatagcctaccaaaatcctaagggttatcatcaagtacattacacacaagttaaaccatacggtaaggtgggttataacttgtaccgtggctatgagggtattaagacttggaaagtaatgcatagagttggtacttgggcaggtacgaattactataaccaagctacttataacgcagtaaagaacttccaacgtagtcaccacttgccagcaactggtaatgttaacttagctacttgggaaaagatgggcttttctaagaagtcatggtatagcattgatagttatgttgccccacttaaggcttatgcttggcaagggcgtaaagctcatattgaagcaatgattaatcaagcttacaaatatatgggaaaaccatggttagcaggttgttcaactagtccaagctacggtgttgattgttctggtttggtaatgcaaggtctttatgcaggtggcattagtccagttccaactagttcaatcggccacgctcatccaggcaatgaatggaattcacgtaatctttgggctgacaagcacctaaagcgtgttccatattcacaaagacaatgtggagacttagtgttctattaccaaccaggtacgcacactatttggcatgttgcgatttacttaggcaataaccgggtaattgaaagctggccaccacgtgtgatggttcaaccaattgttaattcacaaagaaatgtaattgctggtattaagcgaccatttatttaaggaaaaatatgaaaaaatacttagctattttattagtcagcctgggctttagttcattattgttaactcgccaaacagtacatgccgctgataatgatgatgccgcgacaactaatcaatcggctcctaagtatactggccttaaaaaagttggtaaacattatgtctattttgatcaagcaggcaagcaacgttttaaaaataccaagactaaaaaagcatattattggattaataaaagcggcaagatagttggtattaataactacgccaaggtaattagccaactacctgaaatgccaactggttgtgaaattactgccgtgacaatgatgattaattttgctggtaaaaaggtaactaaacagcaggcggccaagattatgccgcgcagctctaaccctaacaagggctttatcggttcgccttacaagaaatatccgctcggctattgggttgctcctaatggggtgaaaccagtagtgaagcattatcttggtagagcacagaatatgattaattgtggtttgcccgcaattaaggataagctgattaattcacacttggtggttgtttgggtagggatgtttgacggcctctctaaccatgctattaccttgacgggttaccatggtaaaacgatctattataatgatccttggactggaaccaagcggaaaatcaagcaggaaatttttgcaacgcattgggctttagatgctcatcgggcgttgagttattaattttatgtaaatatatttactttttagtcatgttgatcaagccactttcgcagcatttcaacatattcatctgttttttctacaaaagacatgtgaccgcagttttcaaatagctgccatttactgccagcaagctgatcctgcatcgttttagctacataaggtgtacataaatcatcagtcccactcgtaattagagttgggatttttattttgcctagtttttctgtgtattcgtaatcgtgcaagttgccctctggcgtatattcatttggtccccaggcggtttcataagctacaataccaccacatttttttcgcataacgcattcaggccacgttttcgtcatgtcaattgcatgttgattcatgaagtgctcattagcttttaagtaatcaggatcgttaaaattgctagtcaattcggcgcgatgaattgccgcctgttcttcaattggcaagtatttaatcatccggtgtaattctttgctccataaggaagcagacgacaaggttgaagacaagatcaagctttgaatgccaacaggatgataatcacacatgtagattagcgctagcatcccaccccaactttgtcctaataaatgtattttgcgcaaagccaagtgctcccgcaacgccatgagttccttaacccatgtttctttagtataaagttcagggtgatcatcagggatgctactcttgccgcagcctaactggtcgtacatgataatccgtcggttatcaatttcggctaatttgtccaaaacctcaaaataattatgacttgagccgggaccaccatgtagcaatacgagtggtgtcttttcgcttcttcgaccaacaatacgatagtaagtttcatagcccatgaaaggcatttttccttcgataatttccattttttcacctatttgaacaaaaacaatgagatattaaccaaaattagcagggtaaagaagattacccaatctctagctggtaaaggaatagcgatgatcgtcgaccttctttgcccttcgacatagccatgtgattccattccttgggccagattgtcagctgaatttaaagcaacaagaattgctttaaaatagaggaccggcgaccaaaaactgagataaatgccccgcatcatagcgctagttcggatctgtttaaccgccatcttcatctgcggaataatgttaatcgccgccagcacgccgtaggcaaatttactgggtaagtgcaggttctgctctaatgatcgggcaaagtctgtagcggtgttattacgtgtcacgcaggcaatcgtcaaggtataaacatagatacgcgttgacaaattccaagcataataagcatttggtgttggtgaaaaccaaaagagcgttgcaaagattgtaaaagcagcaataaagggcaagataatgagcaagattaactctttgattttgaatcgagtaataattaaataaactagcgcgaaggtgattactaacaaattagtaactaagctagcttttaaagatatttccagggaaataataaatgctaaaagaaattttaaactaggattcataagcttatctttctacatattttaagcgctgatccgcaaaaatcaggtggtaatcgcaaaattcagctagctcgtctatctgatggctaatgataaaaaacgtctggtggagcttttgctggctttctcgcattaattctaaaacgagtttgaccgagttatggtcaagtccactgagcggttcatcaattaataaaacctgatgcttagtcattagcattaatagaatctgtaatttcttctgttggccacctgagagagaataaacaacttggtctaagtgtttggctaaacccaatttatctagccattcattgaccttttcttcagtaaaaaataaatttctatcctttttacttaattctagttcatctttgacagtcacagctaaaaattggtcgcttgctttttgaaaaatttgagctacttgtgttaaatattttctagctgagatttgagcgatttccttatttaaataagcaaaattaccagtatacggaatcattttggtcattactttaaataaagacgtcttgccaacaccattagcaccagtaattagggtagtgccagaatgcaaatttagctcattttgcttaagcaaaagcttgttttgtctaatttggacttgttttaaagtgaaaataggctcactattaggtaagacaaaatgataatgtcgctcatgcaattttttattttgttcaaataaggctatttttttgctagcatttaattcaataacttcttgattatttgtaaactcaaaaagatggtcgcagacaggttcataatcgtctaaaacgtggtcacttaaaataatagtttttccgttgtgagctaaaatcgctaattttttaatcaaaaaagcacgtgtcttaggatcacaactggcaaacggttcatctaagagcaataaatctacatccatagctattaagacagctaaagcaactctttgttgctgaccgcctgatagagtattaatcttttgatcgagaaggtctgcaatttgggtgaaagctgttgcctgatctagtcgtgtttgatactcaccttcatctaactgtaaattttctaaagcaaagacaatttcttcacgtggagttggcattgtaaactgttcagccgcattttggaacatcattgccgccttttgtccgtgcaggtccaccatacctgttagtcgccctgcatatttgggatacaaaccagcgataattttgagtaaggtagatttaccgcagccggtcggtccaattaacagagaaaaaccatggggaatttcaatatttagatgattgataataggttctttttcataagaaaaagtaagattgttaacggttactttcataagcttgattgtacaagatgctttggggactgtctacaggtagagtttgttataagtagaacaaatcataaataatacttaatactaaataaagttttgatttataatgtaattatagtgttaccatattttatttaatttaaggaaggtggacatatggcagctgttgctttggaccaatatctggcaagtgtattaaagtcaaattcaacagataagaatgaaataaagttggaagctggtaatccagattttgatctgtttactatctaccttgaaaatcataatactggtattcatcgctatcggatggatgtttcaacgattttatatattgctaagggtactgtgacaattaagagtggtgaaaagatcattcaaatgaagtctgggaatgttttgctactgactgaaggttgcaagtatgagattttaagtcaaaaacctgatacggtactgataaagttgaagtttaagcgtggatttctatatcgcaagtattttaaagattttagctgtaagggagaacgtgaggttaaagttattgagcaaatcgttgatagcttagaaaatgaacatgttctttggctaaaaaataatcaaattactcgtgcttctcaagtgatgcaacatattattggcggttatttgaataatgatttgtttactaaagctttaattcaggctgagttgaccactatgttgattatttcaattagaactcagcgcatggcaacaccgactagtttggataaaactaagtttgaaaagaagaccttagataattacatcgatcttcattttgccgatgtctctttatctgacgctgcaaaatactttggcttcaatcctaattatttctctaatatggttaaggctaagactggcaagagttttgtggatcacgtggatgatcgaagaatgcaagaagcgcgtgaattgctggctcagcctgatatttcacttagagagattattggtcgagtcggatattcgagtaagtctttcttttataagaaatttaatcaatactaccacataacaccagcagcgatgcgggcagaattgtttagacaagcaaatatcaatttaaagtaaaaaaataatctggacgaaagttccagattattttttacatattttctaagcgtttaatgcggtctgctgttggtgggtgagtatcaaacaagtgcgtcaaaccgtgattgtggaatggattttcaatatataatccagcactactactatcagctactttcattggttggctattttcaatcttgcgtaaggcagaaattaagccttgcggattacgtgttaatttaactgaagatgcatcagctaggtattcacggttacgcgataaagccatttgggctagggatgcagaaagtgggcctaagatcaacacaaagaccaaggcaaccactttaaaaattatggctaaagcattactgtcacggtcatcgtcgtcatcactgcgcacgccgccccagaaccaaaaattggacgccatattagagataaaagaaatgaccccaactaataccacggcaattgttgaaagtaaaatatcgtagtttttcacgtgtgataattcatgccctaagacgccttcgagttcttcacgatcaagtaattctaaaattccttgagtaactgccaccgcactatgttcagggtcccgaccagttgcaaaagcattgggactaggatcaggaataatatagacccgtggcattggaacctgtgccaccatcgccatatcttctacgatatgccacagttccggattgtcggcttcatgaatttcttgcgcgtgattcaagctcataatcatgttggctggattttgccacatgatgaataagtagactaaactaccgatcaaagcaatagtaacgcccattgttggactattgctccaaagataaccgattcccgcaccaactaagcctaagatcaccaaaaagatgaacataattaacgccgttttgcgtttattacgagcaatttgttggtaaagcatggttaaacttccttaaaattaaaacttaacttgaggcacattcttttcttcactaggagtttctaagtagttaatcttagtaaagtggtgccacttggcaacaatatttgatgggaaagtaagcaacttttgatcatatgttgctacagttgaattataaagttgacgagagtaagcgatcttgttttcagtgttagtcaattcttcttgcaattttaagaagttttgattagctttcaagtctgggtaggcttcagccaaagcaaaaattgacttcagagaatcagtaatttggttagaaagcttcatcgcttcttcatggttaccttgaggcacattaaccaattgattacgtaatttgactacttcctcaaaagttgatttttcatgcttggcatagcctttggtggtttcaaccaagttgggaattaagtcattccggcgcttaagttgaacgtcaatttgactccaagcttcttcagcatagactttcgctctttgtaaaccgttgtaagttactatgtagatagccacgattaaaacaataatagctaaaatgatccaaattaaaggtgacatagtttttcctccataaaatatttatttaattttatcgttttcgaatttcttgagcaataaaaaagaatgtcaaagcggcattcttaacaaaaaatattaaattctgaagattaatagtaataatccaactgcagttaaaataatcaaaccagcaaattgcataatagtccattgaataaaaaactttttcttacttacgctaccgtgttggttgaaagtcttaagaactaacatattagccattgaaccgatagcggaaccaaaaccaccaatgtttgaacccaagaataatgcttgagcataagtggtaaatttaccaactaaaatggttgatggtacattgctcattacctgactagagataattgaagcaaagtaagttgaaatttcagaataaacggtgccatgaattagatttacgataagagggatttgttggatatcgctgatgaagatgaagaagccggtaaaggtaagaagtaaggcatagtcgattttgagcataatcctaggattaattgcaagggctaatgcaaccgacgttagcatttgccaaataatatcaatggttctgaaaacaccaaagaagaagaaaataaagacagcagtagttatcagcgtcgggcgccagctgatcttgattggctcagctttttgcaccggaatttcttctttaggaataaacagaaagactaatcccatgattagcattgaaactactagataaggtacagaccattcgaaaaattttaatgggctgacatcaaagcggctgactgagaaaatattgtgggggttgccccaaggcgtaaatgctgccccaatatttgcgcccatcccaatcaaggtaacaggcaaaatctgtggcaatttataacgcttagcaatatttaaatacagtgggatcaaggtcaatgcagtaatgtcattacctaaaaacatccccgaaatgacagccaacaacgaaaacagcgtgttcaacttacgcgtattatcggcaatacttgtaagcttgtacgctaaaacatccagaacatgcaagtatgcatagatctggataatcgttaacatcgcggcaacagaccataatgtatggaagttaatgtccgcaaaccgcggtctggcaaaaaaaagactgactactgtaatgatcacagtaatctgtaaaattctatctttagcaatattctttaagacggtcataaaaggtcccccttacgtattacaatcgtctaaaaaccctatgtaccattttgagcctttttgttattgcatgcaatgataaatttaaaaaaatatcaagattagcggtatttttgagcatatttttagttagttggaactagtcgtgctatacttaaataagtaagttaataaaatttagattgaaacgaggaaacaaaatgacagagaatgcaatttcaatcaatattaaaccagatgctgcagaaatgattaaaagcaagatggatgcagatcaccaaattgttatcttggctttagatgatggttcaaccaagtattctaaaaaaggcggcacttgtactattggcgacagcttccagtttgtaatccttgctgaaaaagatcctaagtataatatttcaatcgaaaataatgctggtcttgacttgtatactgctcagccggaaacaactttctttgaaccaggtctagtggtaaatgcacgcaactcaactttgagtttatcttcagacagcggcattattgatggtgggatgaccgttacccaatatgaacctgaagcaattactgctgatgatctaaaaaacggcggtcaatgttaaaaaaataaaattaatcatagggacgagggaatgacctcgtccttttttagtatagaattaagaaagtgatttcaatgtaaggggggaagaacaatgacttttgtcaaagaaataaaagcaggtagtcgtgaattttgccaaaattggctgcggtatctgctactttttatgggattaagtttatttaatcaatttattgttattccactttttcgctatattacaacctttgttttgcaggctagtgctattccgttcgtatcttatcgaaatgtagtgacgatcattacgacgcatacggttgcctttttaattttgataattgagttgctgcttttattagtaatcttgtatgcgcaattagcttatttacttcatggcgtttgggatattaagcatcaagtttttacgtggaaaaatagttttattcaaacttggcaaaatatcaaaaaaattcgtttgggcacgctttttattttgatgctctattttttattggtagtaccgttagccgatgtcatctttagaacaccacttttaagcaaagtgcagatttcagaatttatcttggattatctgacgagaacgccaatcttgttagccgttttgattgcgttttatttagccgctttgatccttggtgcaaggctagtatttgctttacccatcatcgtttttgaccacttaaagtcagtgcaagcagtaaaaagaagttggcgattaacggcgcactaccgttggcggacgatttgctggaggattattgttttagccgttttatctgcagcagtcatgacaattttctatttagcaatgtattgcctgcagctattagttgatttattacctgggaaatgtccgttaattttagccattagcaatctttcgcttgttcaaattattagtgaagtagcgttagtctatgttagtgtactgggcttatctattattttgaaagctttaaggcaagaaaagataagtcaaacaggtaaaactaaaaagataattctaagtacattagttgtgtttgtactagtaatgattaatgcaatatctaccaattatttatatttgactagtgtaaatgctaaagcgccagtaattatttctcatcgcggcgttgatgataaaaatggcgtacaaaacacgttacagtcattaagaaaaacggctaaagaaaagccaaactacgttgaaattgatgttcatgaaactaaggataaaaaatttatcgtaattcatgatgagaatttattgaagctaacgggagttaataaagccccgaatgatttaactttacggcaattagaaaagttaactgccaaagaagacggctatcatgctaagttagttagctttgatcaatatcttgaggaagccaaaagactgcatcaaaaattgctaattgaaattaaaacgacggctaaagattcgaagaaaatgctgcagcgctttaatcaaaaatatggcaaaacgattcttaaaaatgcgtatcaagtacaatcactcgactatcgcgtggttgaaggactgcacttaattaatccacgtttggttgtcttttacattcaaccttataattttacttatccgcaaagtgttgctagtggatattcaatggaatattctaccttgaattcagactttatttggcaagcccatttgcaggatcgtcctgtttatgcctggacagttaatgacgaaaaattaatgaagaagatgatgtatcaacaagttgatggcttaattactgatcgagttgatttagctaaaaaggcaattaaaagtttccaaaaggatgctagttatgctacgcgaatcttaaattatattgttgtcctgcatctgtcgaaaaattttgaatctgcatgaagacttgatctgaagggctggacatggtaaactatactagattttcgaaaatctgaaaggaagtatagcatatgcgtaaaggtgaaaattacaacactggttgtgaaccaaatcaaagacctaagaacaagagaaacgcaaagaagcgtgttgctcacgtagcagcagttgttgctttcttgaacaaggccgcaaaagacgaaaacaagtagtctttaataatattgaaataaaagctaggagctgacgcttctagctttttttgtgcttactgaaaaaattaattctaagtgtataattttttacggtaagttgaataaataattaaaaaagcccaagtcctttgaatttggacttgagctcaaacaaaaagaccagtagtctgatgttaagaacaaaaaacacattagaagctggtcttttatgaattcaattgtaactgaaatcgcaaatattataaagtctgaagataattatattaagcgtgaaagaaaaataatctgtttcttcttaaacctgattaaggaaatcatggccttggctttagctaaagttgatgatgaaatgattaccaaggttaaagcacagcaagctcttagttaaaatcacgccacttaagcgttacccaaaagttacgttagttgtaccagctcataatgaagaattagttattagtaaaactacgcaggcaattttaaatttgaattatccggctgataagttacaaattttaatctatgctgataattgtactgatgatactgctaaaattgcccgggaaataatcaagcaatatcctgaacggaaaatcaatgttcaagtaattgaacgaacaggtagtggtggcaaagctggtgtattaaatgatgctttgaagattgcccaaggagaataccttggtgtatatgatgcagatgccatgccagaagaaaatgctttgtattttttaattaaaaagattttggaaaatccggtgagatataaggctacttttggtcgcaataagacgagaaatgcgcggcagaattttttaactaagtgtatcaatcaggaaattgttgttacccagcgaattcaacactgcggtatctggcaattatttaagattggtcgtattccagggactaactttattattaatactgattatgtcagatcaattggcggctggcgcaatggcgctttgaccgaagatactgatatttcttttaaaattatgggctcaggtagtttgattgccttagcctataattctgaagccttccagcaagaaccagaacgcttaaaagattattatttccagcgcttgcgttgggctaaaggtaactatgaagtggtgatcaataatttttgccatctttttgataaaagcaactggcgggttaaattagagactgtctattattcctgcacttttttctggtttaatttggcgattgttttatcagatctgatctttttttctaatttgattgccttaatcgtccatctttggaatcctgcagtagtaataccatttacaatttcgcggagtaatattttattagctcaaattctgctctttaattggctattgatggttttgctttatattttgcaaattaacctagcgatgactacgcaatatgggcaggcaactgacgaacagatttggctagccttagcatcatattttacttattcgcaattgttcatcattgtatcaattcatgcggttacttcagtaatgctagatcgcgtttttcatcgtgatagtactaaatgggttaagactaagagatttgcggattaggtgatgagatgaaaaaaagatggatgctactaggatttttactcgtaacgattgcatttaccggtattatgatctatatcagagcagataataattcagcggtgcgtaatttttttctacattcttggcataaaaattatgtagttgaagaaaagaatcttgcctatattaataccacgcctaagcaggaacaagtgacggttttatctgaaggccaaggatatgggatgtttattgcggcgcatgatccagcagttaaagaaagcaactttgctaagctagtgcagtattatttaaaacaccgggatcgtaatacgcaattgatggcttggcggcaaacaaagaaaaatggaaaatggagcagtgaacgcaatagcgctactgatggggacttatttattgctaaagctttgtttttagcggctaaaagatggaaaaccccagcatatcagcggcaagggcaaaaattaattgccgatattttgcgttatgaatataatccgacaacgcacgctttaacggtgggcaattgggccgattctaagtcgaagtattataatttaatgcggacttcagatgtattgccgacaatgtttgatcaattttatcgtgaaagcaatgattcgcggtggctcttaattaaaaaaacaatgctcaagcggctcaatcagttgagtcaccagcataagagtggcctagttccagactttgcctggctgacatcaaaagatgctaagccagttaaaggaagggttaccactgatcgatatgatggtgattattatgccaatgcttgccgggtgccaatggatttagcatttagtaaggataaattagcaaagaatactgtacatcgcttgcttaaattttttagcaagcaaaatacaattacagcaggctatactttaaaaggcaagccggtcaataattatcaatcagctagctttagcgcgccaatttatattgcggtgaatgaaaatcgcaatcaaggctatgataatttgtttgcttcgcagcaatatatttttgctaaaaaattacctaaaaataattactatgatgcagcactaacgacgatggcaacgatactgacaccggcgcatagattttaagaggcaaaggcctctttttatttgcattgaaaatcaatctttgataacatagtaaaaattttaaggaaaatgaggaggacaaaaaatgggattaaatgcatacattcaaggttttaacagtttagagtcaattgatcgagcaccgggctacttcaagtatcatcaccactcagtagctgaccactgcttcagaacagcggaattagcacaaatgatgggagatattgaagaagtaaagggcaaaaagaagatcaactggaaggctttatatgaaaagagcttgaatcacgattatactgaacgtttcatcggtgatattaagacacctgttaaatacgctactcctcaacttagaaagatgattggtgacgttgaagaaacaatgaccactaagttcattaaggatgagattccagaagaatttcaagaaatttatactaaacgtctctcagaaggcaaagatgatactttagagggtaaaattttatcaatctgtgataaattagatttgttatatgaagcttatggagaaatcgaattaggtaatcctaacccggtttatatgcaaatgttcaaggaaagtcttgaaacgatcaagaagttcgacgatttagtttgcgtacaatactttattaagaaaattttgccagatctttttaaaggtgatttcgcgggaaaggataagatgcaacgaatagcttttagcattctattgttaggggatgattaggtgaaatttcaatgtagttcatgcgggctgcgcatggactctttgcattttaagcaagaggggttaatgaatcctaagttgaccagtatttgcgacatttgtatcacgcgcaacctgaatccagaagattacgcaaatgatgcggtcgcagcttttgctcaaagcttgctttacacgtttgtcggtgcaaagaaacaagatcaatcaggttttattgtgaaaaataaaaaggaccgtaaaaaatacgaggcctttttacaagattatgatggcaatgaaatcgcccgccaacagattaaaaggtctgatttgaatttggcggtaattaaaagcgaagatggcaagcttaattatgtgcctaaccaaggcgtaacttttgagcaaaatttaaagggaatgggtttggagatcaatttccagttaaacgaagttgattttattgatcgtgaacgcattcgggccaagtataaataccgctgccaatattgcggcagacgtggccacagcgtagatcataaggatcccgtttctcttagtcacaacaacagcttagataatttaactttagcttgtgcggaatgcaaccgaattaagtcggatatgccttataagttgtttattcaactgaatgatcaaatttctgagatcaataaaaagctagttaagtatgaagatgcgctgggtactttgagagaagaatttgagcatcgtcggcgctatttagcggctcaagtacaccttaagggtgttatcaatgatcctgagctaaatgcgattagaaagcaaaataagagcttacaggatgacattgatagtttacaaagtgattatgatgatttgcgtcaaacgcgcaagacgtattttgatacgggctggaaattagctcgcattaaggaaaataaggatattatttaaaacgtaaaaaagcgctattttttgtaaactcaattcaaaataaaaaatgagttttaaaaagatcatccccatataggcaatgtcattaagttaagacattgacaaattgaatctaatctctgtagaaccgaatcattatgatttggttctttttttgcataaaataaaggcgaaaagaacctaccttttcgccctctgattaaattattaaaccttcaaaattattgccagaaagctggtgttaattatgaaagcccttcacagaaatattttagatcgtcttgatcaaattatcaatgatactggaaagcatattcatgattttatcgatgatcctcatgccttcactaggaagcggtttttagatgcagctacagtcattaaaactactattaatatgcaaggaaaagatttgaccagtgagttgtttagagcttttggccaaaaagctattaaaaataacgataaagtagtcagtacttccgcttatgtccaacgcaaaggtcagctttcacccgcatgttttaagcatattctaactgtatttaatcagaatttatttaatatccagttatttgatcataaatatcgtatatttgccattgatgggtctgattttaatcaaatctggaatcctaaatcagagaatatcgttggaaatctcaatcataaaggaaagccatattgccaaattcatgttaatgcactctatgacctgttaaataatacttatcaagactgcatctttcagcctaagtcaaagatggatgaacgtaaagccgccgttcaaatgcttaaaaagctaaattgcggaccatatatagttactatggatcgaggttataccggctttaacatgattgaaaattgtaatcgcctgcctaactgttattatgtcatacgtactaaaacgggatatggcgcatttaaggaagtagctgagttgcctaatcaagagtgtgataaggatatagcttgctgggtgactacctctaattattattatgaaacccataaggctacagaaaacgttcatttggttaaccatcattaccgtcaatatataaaatatcggtctaaaaataccaaagatggcagctgggactttggagagttatgtacaataaaatttcgtgcctgtaaatttagaattaatgatcctaaatcaggcaaagaagaatgggaagttgttctaactaatctaaatagagccgattatcccttaaaaaggatcaaagaaatctaccatttgcgctggggcattgaaacttcattcaaaaagttgaaatatgctttaggtagcgtacagtttcattccaagcaggatagatttattgaaatggagatctatgcccacatgattatgtttaacgcagtcagtcaaattgatgctcaagcatatgtaccacaaaaaaaatgcaagtatcaatatgcgatcaatttcaaacagtcatgttttgtcatccaggctatgtatataatttcttcttcaactgaaatctttaaaaagattcttattcaaattagtcattacacaattccgatcagaccaggacgaaaagacaaaagaaatctcaaacccaaatcagctgtatattatttatatcgtgtagcctaatttctaaacaagatttgggtttatttggcatgaaaaaagagcattcaaatgcgataaatcgcaaatgaatgatcttaaaagtccaagtcgataatttgtcaatgtcttaacttaatgacattgcccatataggaatgatctttttaatttttatctatctaattcgatcttctggatcaaataaatatttgtcccatttaacttcattttgaacagtagggtggaagagcaagaatgctagcaacagttgaccaacgtaaggaattacgcccagccaccaccaaccaccgttaaagcctgcgtcgtgcagacgacgaacagtgtgacctaattgtgctaaaaaggcccaaatagctgctgcaataaagaaaataataaaaatgatgaagattacaccgattaccttggcatcgccagaatcaaattcagtaacgctgaaaggagctaaaagcatgaaagcaagtaggtaacaagcaaatacgccgattgtcatgataacttggctaattgcagtacctacccagaatgaggttctagtagatctagcatcccacttaaagcagtcaaagaagtgttccttcaagatttgaccaatagttggtacaggaacattactttttgcgccacccttaggataatcttgatcgctgaacaagtatttgccccacttaacttggcgttgaacagatggctgcaattcaagataaaataaaaacattgcgccataaccagtgaaggcagcccagtaccaatagccgctgtagccaacatcgtgcaaacgtcggatcgtttgtcctaatgcagctaaaaatagccacagataaacaacagccgcaacaataccatcgactattctaatgccggggttgatgttttggttaaaagcatagaagccaagaaggatgcataagatgccgataacaagattaatcaaagtgctccaccagaaagatttacgcgtagttcttgctttccagttgaagggatgcaaataagcctcgttcaaaatttgcgcaaaactttctgcaggcggcagtggcagactttcgtcataaggcttgataaaataatatactctatcattcattttacttcctccaaaaattaatttgttataaattatacgctaaaaaagccgtgaagcaattaaacttcgcggcttttttgatattagaattcattatttctaaagttgctcaagaacttttgcgtcttttcattcttaggatggtcgaataattcttccggtgaaccttgttcagtaatgataccgtcactgatgaacaatacgcgatcagaaatactcttggcaaagcccatttcgtgggtaacgatcaccatcgtcaaaccggttgtagcaagcttttgcataacgtctagtacttcgccaaccatttctgggtcaagggcactagttggttcgtcgaacaataaaacttctggattcattgaaatcgcacgggcaatagctacacgctgctgctgaccaccagataattgttgtggcttagccttaatgaaaggatccatgccaaccttttctaggtttttcatggcaatcttgcgtgcttcatctttagaacgtttcaagactaattcttgaccgaccatgcagttttctaaaacatttttattttcgaatagatcaaactgttggaaaaccataccaacctttgatctaaaggtattgcggttatagccgggatgcaagatatttttaccgtgaaaatcgatctcgccgccagttggttcttcaagcaggttgatacaacgcaaagtagttgatttaccaccaccagaaggaccaatgatcgttacgatttcgcctttattgatgtcaaaggaaatatcctttaatacttggtgatttccataagacttttgcatgtgctttaagcttaaaattacttcgtttgattcagtcattaattatttgcctccgcatcttttggagtaccaacttggacttggttagccatcaagttgtaattcttattaccttcaagtctcttttcgataaagttgaagattctagtaatagtaaaggttaagatcaagtaaattgctgaaatcattaagtaagttgggaagaacttgaatgattgactggcaatagtagtaccaacgaagaacaattcagaaactgagatgatactcaatactgaagtatccttgatgttaacgataaattcgttggtgattgatggtaaacagtttctaatagcttgaggcaagatgatatgccacattctttggttgtgggtcataccaagtgcactagctgcttcgaattgaccttctggagttgaaataataccaccacggataacctcagctaagtaagcaccagtgttaattgacacaataatcaaagcagctacagttctatttaaattcaagtgccagaattgggcaataccatagtagattacggctgcttgaaccatcattggtgtaccacggaagatttctacataaacagataataaccacttaactacgttcaaagtccaacgcttgccgcgagtagttggagtaggaatggtacgaataattcctacaagcaagccgataaagaaaccaacaatggtaccaactaaagctaaaagcaaggtcatgccaatacctgacataatcatgccaccatattgcttccaagtagtaactagccagttttctttcttagtttcgttaccagccttaggttgttccttgatggcttgtgacattaattgatcacgctttttattagaaatagttcttaaagtagcgttaacttcatttaaaagcttggtattaccctttttaaccccgatactagttacggaatcgtcatggtcaactttgaagccagccattttgtttaagttaactgcaataatgttagggttaacgttgtggtaactttcaaattcaatatcttcagcaacataaccatcaatggtgccagaagctaaactttgacgcatggctgaaaagtcacgcatagctggttctcttttagcaccttttaattgcttgattaaatcgtagtgcaaagttccttgttgtgcggttaacttggcacctttgaaatcagtcaacttcttagcattagaatatttacttgccttattagtaattacgacgaaagtacttttacgataaggttctgagaaattaattgccttgcgtctttcggcagtaggagacataccagcaataattaagtcaattttacctgaagttaaagctggtaaaaggccatcccattgagtcttttctacgattacttttttgtgtagtcgtttaccgatgatcttggcaatttgaacatcataaccattagcataggagttagaaccatcaattggaacagctccattagctttggtgggctgagtccagttgtatggaggatagtttgcctccatacctatctttaacgtgccagaatctttcttagcagcttgagtctgattgctactaagagaaaaaccgataaataaactgagtaggacagacattattacagccatccatctaaatcttgacttcaattataaaacctccaaaaatagttttaacataaagccaacacaataaagagtaaacaaaaacctcgctcttccaaagaattgcgagggtcataatcatcagtgtttaaaccaaatcttatagcgctccctggggactaaccaggacagtctatagaatattcttctatagcccaacagattaacacgcgaatattaaatctatttcggcggcaaccctaagttaactatcattgttttcgcgaactcaaacttaacttgtgattgtcgcaacctctattgcattggaaaaatatttaactaatgaagaatactagaagaaaaagttaaatttgtcaagcccaaccattattagtttcataatttctctttttcatatcagaaacataaggatttcctgctacataaaaacgtaatttcttgttagcccaaacgggatcagattgattgataccaacacgcgctgcagcaattatttcctggggaatttttttatgacgatcatcaagatcaatggcgaaaggggagtctgataaaaagtgcaaattccaattcttatcatgaataccaaaagcttgcatcatttttgcgggaccattagtcaaaagaacgccatctttaccatgacggttcttgatcatggtctcaattcctaaagtgggatcgattgcacggattaaaacaccctgtggttcattctgaaccttagtggcaacatcaaagaaaaaatattgacgttgcgcgtagatatagatcgttccgcctttgccgtaaagtccttcattcgctgggctacgacgaccgccataagaatgtgcagcgcgatcctttttacccatatatgcttctgcttccacgatatagccgcctaatttttcttgaccattatcaaaagtaagcattcgcccaatcaggtcttttgcaatataatcggtagtgttagtagaaaaataagttgaataattcatttttgacctttctagaaaagagataaaaaataatgacagaaattaaattagttcgaatttatgaccatgagcaacctgctggttatcggattttagttgaccgtttatggccacggggaatgagcaaagttaaggccgatttagctgaatgggataaacaaattggccctagtaaggaattgcgtcagtggtttaatcatgaagatgaaaaattccctaagtttaagcaaaagtatattgaagaacttaatcataatgattatacagcggaatttttgcaagatgtaaagaagcatttggctaaagaagatgttcttttcttatttggtgccaaaaataaagagcacaaccaagcagttgtactcaaagaatatgtattaaatacgctaaacagttaaatatgtttgtgaccgtgttttttaactttccaaaagtggaagagaattgtcaaaattaagatcgcaaagacaataattgcaaaaacggtgtttggcaactcaaatctcaatggtggcagagctagtagcaattttaaagcgatgattcctatcaataagtaagccattggctgcaattctggaataatatccattaatttaatgataatttcggcaactcctctcatacagagaatgccgatcatgccaccgattaaaacaacaacggggttatcagacacggctaaagcagctaaaacagaatcaattgaaaagacgatatccattgattcaattgaaataaccgtacgccagaaaagagatagcacatgtctctttttctttttgcctttgtggcgagctgcttcgcgctcttctttttctttctcatgttcggcagcttgtttagggtggcgttgatcatagaagaatttaaaggctaggtaaaaaagataaatactaccagctaatttaatctcccaaaagttgatcagataagtcccgattccgataacaataaagcggaataaataagcaccccacaagccataaaccaaggacttgcgttgttcagctttattaggtagcacctgtgtctgtgcggccaaaacgacagcattgtcgactgataacaagcattccatcaagattaaagtcagaatgatcatccagtctttgccactggttaggacatgtaaccagttattgccgtcaaaaaagggtgcatatagtttaagaattgacatgtagttgcttcttttctaatttaattaatctgattttttctttttgtcccagacgataagtcccaactttattgttggataaaataactctttggtcaggaataaaaatcaaaacagggtttaatgctacggcgtgtgcaactgagcgagaagatgtggcttcggctagtgaattggcgacgtcaccataagttaacgtcacaccataaggaatatgctggacaacggctaatacctttcgttgaaattcagtgccgaattccgaaatatcaataggaacatcaaaattctttctgataccagcaaaatattcctttaattgtttgatatgaggtgccatctttttagggtcccgcaccaacatgcggtgagggtagaagctaaaaataggtgaaacagtttcatctcctttaagtccgacgtaagttaggccggcttctgaagctgttaaaaagtaggtccatggctcaattgtaacgtaatcatagtaaaaaaactctgtcatgtgtaacatctttattaaaaataattagtctaagaataacaaactaggaaagttaattcaaattctggaatgctgttaatgcatccccaattatttgcgtgacaccaggggtaggaatttctgtcttgttgatagagtaaattttggcgtcttctttgcgataagccaagagctgggcaaaaggataaactacaaaactcgtcccacaaatgatgatcaagtctgatttttgcattatttcaacggactggtttaatactttcggatcaatgccttcgccgtataacacaataccggggcgaataattccgccacaatctttgtgtaaatagcttttagcatattcttcataagaaacaggttgatgacatttagtacaataaatattatataaattgccatgaaattctgttacatgttgattgccagccttagtatccaaagtatcgatattttgggtaattaaattacctttttcattacaaaaatgggcgattttttcatggattaagtttggtttagcagtaggaaagtacatattgttcatgacaaattcatggaaaaattcaggtcgattgaatagcgtactatcgctcagtatagtttcgggactttcttgcacgccatcatagattccgtttttagagcggtagtcagggatacctgagtgggtagaaacaccagctccagttaagaatacaatatgttgggcattattaatatctgtttgtaattctgctaaatccatcatataatgtcaccctccgtgaaagtcactactttaattataaatcattgttttgttataatgactgaaaattgaaagcaccaaaatcaagctcaagtcctgtcactattgagctttcttagacgtaattagtttttatatgatctgtttcagtgcaatttgtatgaatcgtggcagttggttaataaagtcattgattacttcatctatcttttcaaaactattctgtttaagctcttttaattctgaaattaagtagaccaatgcatctacgaatctaatatcaggtaaggattcgttcattagatagaataaatctccgattgtcttatcatctgtattttgtctttcctgccaggtcaatagatcataagttattgctgtaactgcgatatagccacattggccatcatagctttgaacttgagatttatctaaagcaagatattgcttagacgtcttaaaatatgtttcaatttgccatctacgaccataaagttggatgatttcttcagggctaagctttgtctgagtagtagctaaaaccaaatacttgttcttgtttccacggttggagacaaagacgagctttaataaaaagctatgtccatgatattgagcctcaactatgcttgaataaagataatgtttctttttacggatgtttgaagcagccaaacgatcatacaagtctttaacgctatagcggcgatggcgataaatgtaataaatctttgaactcttcttgatcatgccaagtccatctaaaccgatcttctttaaaatccaaaacattcttggagaagaaaaccaagaatcgaataagacgtatttagcttctactcctaatcgtaaggcttgtctaatcaactctacagttacatcattcatctttctctgagcttgatttctccttttaccagaaattgaacgttcatcagcagtaatgggagcagctccaatcatatttttcttggttttggttgacatcaaggcaaagttaaccggcaagaaggtattgccatcgctccagcctaaagttaaaccacgatatccgttccaatactcatgcttgtcatggtcatagactttagctagcaattcggtctttttagaaaaagaccgagccatcagcgtatcgtcaacgataaaagcaagtcggcgtcttttatcgataaatagttttaagcagccaatgagccgggctgcaatcaagcataatagtttttgccagttgattcttccatcgttaagtacattgcgagcagttctaacggaaaaacgtttgtcatccttagctctgaataaagaaagccgagcaaaatgtactgacatcagccaagagataatcatggttaatgaaacggtggatttacgcttaaaattgacttgtttagttaacttagctagaccaattagattaataaatgaagaaattaaggatttagtatcattttctgtgtcgatttgttctatactgttcattgcgcaggatctcctttactttttaggtcgacacttaaagtataacgcagagagagcctgcgtttttatttttgataagaaaaagccaagaggcgcggggaaggagcgttaatcttagctttcaagtttcagtataatgattaaaataactaaattgaggggatttttatgaaatatatgacgtatttttatgtagcaattgatattttattagtagtttatgcttgttatagttggtattggcaagctaaagttgattttcgtggtcgctatcgtatctcctcagttgtttgggcgctaatttttatctggctgggctttacatggaattacattgaaaaaggtgatccaggcctgagcgtcttcttggctctttttatcttaattagtattgtcgatggtttttcaggatttagtaaaaagcggatggtcgtttcaggctacttcaagcgtacagttaagtatgatgatttagccagcgctactttaatccagatccccaaccaagagaagccattagtgatggcgatttttcgaactagcgatggtaaggcttatatgatgcgctttaataatgaagttaatagcgtaattaagcaattacaagaatatgctggtcgagaaattcctgtcgaagttcaatcaatgatgtaattacaaaattggagaaagcattcgcgagaatgcctgcaaagtccgcaatgcgcgactttgcttttttatttcttccttagttagtaaatgcgagtgtttcatatcttcttcaaaagctgccaccattttctggttgaactttttatcataaaaaacggcattatcttcaaagtttaagttgtaagaacggaaatcttgattcattgaaccaactgaagaaaaatggtcgtcgacaatcgtcgttttggcatgtaaaaagccatcttcgtagatataaattttgacacccaagcgagttaattcgttggcataccactgtgtggcgcgataaataaaggggtggtctggcttacatgggatcataattcgtacgtcaacacccgatgaggcaattgtttgccacgtagcaaaaacggcatcatcagggattaagtatggtgtttgaatccataaccgtttgcgtgccaaaagcattagccgcatcataccgttacgcatatatggtgcataacgatcaggcccgtctgaaatgatttgcgttgcaacgtcgccttcgtggatgtttttttcatcaagatcaggaaatagagtggaattgaaacgtatgagctgttgattattagtgatagaggcattccagtccatgacgaaacgctcttgcaaaagcagagaggcagaaccaacaattcttacctgactatcacgccaatgaccaaacttcttttttttgcctaaatattgatcaccaatattaaaaccgccagtccaagaaattcgcccgtcgatgacaacaatcttgcggtgcaagtggtagttaatgcggtaacgggtgatcatgttgcgtgaagtgacaaaaggcaaaacttccccgccagctgcccgcaattgatcgaaccatgctttagtagctcccattgaaccccaggcatcataaattacgcgtactttaactccttgttttgcttttttaatcaatagttgcaaaacacgattgccgatattgtcgctataaaaagtgtagaactcaacattgattatttccttagctcgtaccatgtccttaagcatgtcatgaaagaaggtttcaccttcggtatagagcttgacctgattatttttagttaggggagcttcttgttgatggttaaaaaagttaattgctatattaccagcctttgaagtgtcagaaggactagtatttttaggtgctttagcaatcgatttttgaacatttctcaagccaatgtgtttttgcttattgatggcaaaaatattttcctgggaaataccccgaccaaagaaggcataaagagtaatcccgactactggtaatactaacaggatgattaaccaagcccaagtggttgaaacggatcttctacggtggaagacaacgtagaaggctaagattgtgttggtaatgataatgattctaacaaagtcatgccaccagatcataaactcctccaaaattaaactacttttttaatttaagaaacttgtcaataatatcgattacaaacggattgtcatgcatccaactatgttcggcgtcatctttaccgcgtacttctacttcttgataaaaatgtgcttttggggcaacgatatagcgaatgctttttgcggaaacaacagagatgaatttatcagtatttgtgttatctaaaacgttgccataaatattcaagaccgagatatcaggattgaatttgcgccgattaaaaaacaaataaaggtagtgcgggttcatgacactaggccgaccactttcggtcaaatagttgacgtttgggatatcgcccaagtaagtgaccccgtcaaaaggaccagcgataaaggcacatttttttaaatgtgggaacgttttgctgcggtagtgcttcatttcagtgcgaataatacatggacaggctaatgaatgagcgactgcaatatagtttttaaaaccatatcttttagctaaaaagggcaggacgaagttgagataatagtcgatgccatagataccgactattcgctggcgaaaagcaacctgcacgataggatgcttgtcactagtccaagttccttctaatttgaaatttcctaataaatcaacggttacctttaaaaacttgggattgcccttgtcataagtagcgtgtttcaccatcacgcgagtggtataatcaccgccgcgaaagccatggaaataaataatgggtacttgttttagatcgcttttttcaatgtttgccttattttcaatatggcgcttgtgtaatttgaggaaaattcgcgtgggagcgaaggtggccatcagccccaaagaaatcatgttaaacatgctaggttcttcttggaggtcatgtttatgatctttttcaacttcttcagcatatttttttgtgttgaaaaacatttttaccaccttctctttcttttttcctataataaaagttatgcaataagtatattttaccattgggtaaagattttggaattttagaggtagaaatgaagttttatgcagtcaaaaaaggacgtactccgggaatatatcggacttgggatgcagccaaagaacaagttgatggcttctctggtgcagaatataagtcatttgaacaaattaccgatgctacagattacttagattggaatgcccaaactcagagcgatgtcctgcaaaaaggtgaagataatttacaaaacgccgtaaaaagggtgcaacaaaagagtcaagaaataaaaaaagcaccgcgaaaaaaggcgaagcagtataaccatgttaatagcaatcctgctgacttctttgcggtgacttatactgatggtggcacgcgcaatactggtgtttataagggcggtcacgttaaaaagaccgataaagcagcctgggcttatttaattgaatgggatgaccagaaagttcatggctccggtggtgaatatggtgctactaacaataagatggagcagacagcattgattaatgcactaaaaaagctgcttgagcttggttttaacgataaacatctattatttgttcttgattcgcagtatgtgttgaatgcgattaataagcattggctacaaggctggaaaaaacgtggttggagacgttcttctggaccattggctaatgtggcggaatggcaggaattagatcggttattaaaggaatttcctgatagtacgtttgaatggacgaaaggtcacgctaataatcgcggtaatgaatttgtcgatcatgaattgaaccgttatatggatcaaaaaatgtaagaaaaaaggctacactgtagccttttttaatttaaaataacgccgccgaacaaaccactaaagaacttaacgatttgatcccacaaattttgtaaccagttgcggttttcttgggtattaaatttattgaagatatttttagctccattttgaatctgactggataatttcgaagcctgttgcttgaagttaccgtccttcaatgcccctgaatcacgaatttcaattagaagattgacaatttgatttttttgattgttgttgatggtgtcacctaagtggttaatattaatttgattgttgacaatgtcgcgaatttgactgtcggtaatgttttgcccttgtttagccatctcattcttggcaccggcaaccgcattgttcaattgagcatctgaataaccttttttgtttttattatcttgggtaatcccagacaaggtattcatttcatcttgagcggcattaacttgcttttgatttaatgcattgccatttttagcataggcagcataaactccagctaatgcccctgaaccatcaattggaatagcgctagtaacataaatgttggcatcgctgatgccggcggtcagggctgcgtttttgtactggttggcagtaatagtcgtgatattatttttaccatcgtagtctaaaattttaacgttgattccgctgcctgagctggtcttttggatcatcgcactggaccaaacaccggatgaagtggtgaaattatcaccagagggatttaaatatttaaccagatctgagccggtaacagtaattgtttgataattaccaccgtttagtggggcggttaaggtctttaatgtgccttgcttttgcgcatcagttaatgatgtacctaaggtaactacaggtgtatcatcatctgctaatactggcttagtaaatgagatcatcgcgaccacgcttaataacattgctgtgagtagtgtgataaatttcttcattttttcttcttttcttcctttttgatcgaatatttattcttgtaatacggaacattatactaaatatttttcaaaagtgaattaaacaacacgtaaaactttcttaatttcgaccttattattgaagatggtataataaagagcaacaaagggggacaatatgttacaagtgcctaagttaaccatcatcatgcctgtttataacacggcgcaatacttgccacgtgcttttgatgctctgcttaatcaagttgacaagagcttcaaattgcttgtagtagatgatggctcaacagataattcggttaaggtagccgaaagctatgccaatcgttttccatattttaaaataattaaaaagaaaaatggcggcccatccgatgcacgtaatgttgggatgcagtatcttgacacaccatatgtcacctttcatgatggtgatgattgggtggatccaggctacacatccttttttattcatgcttttgaaagtcatccagatgtcagcttagtatcatgtggctattggatggattatcctgacaaaaagcaacgcgttgttggtcgaccagaaggtggctatttaacgcgcggtgaaacttatttgaagttgactaatgtctttagctcaccaatgaaaggatatagctggaacaaggcctataaaactgccattattaagaaatatcatttgaagtttgatagggatatttcactactggaagatcagatttttaacgttaaatatatttctgtggctaaaggcgtctactacacgcaaaaaccttattaccactactggcagagaaagggcagtattattcaccagcctaatattaaaaaagttgcggataatttccggggaaattaccgggtttggagcaaaattatcagtacaatgatgaaagaccgcgaggaagaaaagatgcgtaagaagttagagcgacagcaggccttgcgtgatagtgaataggggaaaacatgaaagaaaaagttaatggagtcgaaatttattatcataagttaggtaaaggtgagcctttgcttttactacatggacatcacttagatggtggtatgtttgataaaattgtggctccgctttctctttattacaccgtttacgtgcttgatatgcggggccacggccttagtgaaggcgacattgcggaacactacaagaccgaagtagaagacgtctatgcctttgttaaacaggttggcattgaaggctgctattgcttcggttttgatgcaggtggtctggtggcaatgatgctagctagaaaacatccaacgatctttaagaagatgattgtagctggcgttttcgttaatggtgcaggcattagaccatatcactacttaacggaaggctttcatcgctttttgagacttgatcgtgacagccgcgtagagttgactgagtcctttatttcagtagatgacttgaagaagattactacgccaactctttgtgtagtaggtgaaaaagactgggttaaggttgagcatgtacgttggtatagccaatttatgcccaatgcgcggttggtgattatgccacggcagacgcatgacagttatgcagtgcgcagtttaaaactgctggatttgattaaaggattttgtaggtaatacgcgtggtgctagttaaatcgttctaggcaatatgccatattataagctaaaatggctatttctagccgctgctgaaagccagctaagctccttgctcggttattttcagcgttatagtaactgagcaaagaaaagtcgctttcaattgttcttctaattgccatcagttgatgattattatgttttttagcacctttcatgttttttcgatatggtgtccaaaggacatagcccataccttttaactcggcagctaagtcttttcctaagtagccttcatcgcctaaaagataatggttaattggatgagcattaatcatcaattctgtcgtttctttggcatcatgcactgatgctttagtgactgcgtagtcaagcaaatagccatcatcgcttactagcgcgtgcaccttgaaaccataataatagactttcttggctgctttatagccaatatcggctatgtcacggaagatcttaacacgataattacgaacaggctgacaaactggaacaggaaaactgtcaataattaaaaattctccagcaacctttacctcttgattccaagcttgacggatgcagcgaattaaaggcaaaagcatcttggctcgacgattaaagcgagaatgagataagccaacaaaaaatttacagaatcttctttgggattcaattccaatttcagtttgccaaatgagcatcgctaagatggagctgtcggaaagctttgtttgatcaatgttttttcgatgcgtaagcttatcaggcgcataaagattatatagtgaacgacaaattacatttaaacgactaaaactaacttgtaaatggtgagagaaacgattaagcttgaggtagttcaattagatcagactcttttctatttaatttacttacaacttgagtctaatccgattggacttttttattaactaaaacgatttaactagcaccacgcgtaggtaatgtggatagtattgctggttaacgtgatagttgctgcagttgctgttatatttggttttcaaaatagggtagaaacattaaatctgttcaatgccggtatagtttttatcacttttgggattgttttacttttaggtgcaattcctgtttatcaagatttcagcacgtcatcaattttaatgttcattgcaggcattttaattattgttagaattattatgctagctgttagtttaattaccaaagtgccaagaacagtaaatctacaggatattgcaatttcattgatgatcgctgcagtttgtttgatatatttcatgcacggtttaaatctgagcttaagtaatttagtcgtgccagaattagcattgattattggcattattttgttttattttaaaagaaagcgtcaataaaattgattgcaaacatggacatctcttcaatagaggtgcctttttgtatataatggtggtgtatacgatttttattcagaagaggtaaataatgaacaaggaagaacttcatcaattattgcacccaatgaaagttattggcttaggtggtaaccctgcattaaatgaaaaaattgcggcaattttacaccaaccattgatcgaaactgcggttcaccactttagcgatggtgaaatccaagttaacattggtgaatctgtcagaggttgtgatgttttcgtaattcaatctatccaagatccagttaacgaaaactttatggaacttgaaattgttttggacgcacttcaacgtgcatcagctcatataattaacgtggttgtaccatacttggcatattcacgttcagataccaagactcgttcacgtgaaccaattaccgctaagttagtggctaacttgcttcaattgactggcatggatcgtttaattactgttgatctacatgcctcacaaattcaaggtttctacaatatccctgttgatcacttacatgccattccacttcttggtcaatacttcttagataacggaattgctaccaaggaagatgatgatatcgttgtagtctcacctgatcactcaggcgctaagcttgctcgtaactttggtcaatacttcaatgcaccgattgcaattgttgatcaaagaggtgctcgctatgatactgaggtccacgacatgattggtgatgttaaggacaaaaagtgtatcatcattgatgatttgattgatacaggttcacgtatttcttcatcaactaagtcagttttggcagctggtgctaagaaagtttacgttgccgcaacccacgcacttctttctaagaatgctactggagtacttaatgaattaccaattgagcaaatcgtagttactgataccattaagcacaagcgctacccagacagaatggtcagaatttccgtagaccaattgcttgctcgtggtatcgattatgtatacaatgatcgttcaatccaccaaatctttgacgaacaaaaccgtttaaagtaaaattcttattgataatttgaataaaaaatgatcctcactatgaggattattttttattcaaaaaatcgggtagataagttataaaactatgtctaaatagtaatgattgatataattgatatgtgttgtatagaaagaaaaagagaaagttagaggaatagactatggcacgacggaaaaacatgaagagacggagagttattctaggtaatactttccatctgatcagagaaaatggaatggataatgtttctttgcaaatgattgcagaaaaatcaggcatttcaaaatccttactgcagtcatactatcctcataaggctaagttaactaacgacattatccgcaatctttttaatactttaggtcaacaagttaataattatgacatggctaatagcaatcttccttatgctagaactaaggcatttatttatacgattgctatcttggggatgcacgatgagggcttggaccgtattatttctgaagcttttgttagcaatgctaccctagataattggggaatcatgcttaatgaatggattaaggaaaatcatttatttgatgacattaacgttgacgaaagcgaacttgagacaggaattgcgtttgtaactagtggtattggccgtctatatcatgatcgcaaaaaacaccatttaacggccgaagctcttgctaactatgcaacaagtgcattgatgttcagtttcttgcattgttcttctgaagaaattgatcaagccttaaaagaaggacatgaaattattgaaactgctgatatggaagttgttcaccgagcaattgatacaatgttcgatgaaggcaaggaaattttcagctaaaggggagtcgccatggttgaaggcaaaagagctgatttgcgacgaatgggttatgagcaaaataaccaatataaacgtttgttggctttcgtcatctttttgattgctgcattatcattgattacagctacttttttaaatccaatctttatgaaaaaacagattaggactagctataatagggcagtagttgttcgccaagtgaataaaaattatgatagcctagctgatttgattaatgcagatagtgaagataattcaaacttactatcggatacgcaaactcaaccaattgccgaccatattattgattattctttgggtattcattggtttaaggttactagtttgccactggctaatcagattttaagcgatatcgatcaaggaattgctaaaggctcgtcaagtggggcacaggaagttaaccgtaaactgaaaaagcagggaactaatgcaccttacgcgattattaaagccttcaatttaagtgtgatcactttaggagcaaatattgctggtttattgtttatcgttaatttgataataattattgttaccattattacaatggtttcgctactcaacgatatgaagtcgcgggctacaattcgaatggtgattcatgatacgatggctgctggcatgtgggcaggtttttggctaattttgatttcaggcttgttagcacttgtgccagtaatctttaatgtcgataatatcgaatttggctttttgcttgagattggcagtagcgtctttttggaatatgtaattgctggggtaattatttacatcatttgtgcgataccatggcaaattacagctgctaaataagaatgagaaaacgtaatctgtagaatgattacgttttttgtttgcacaaagaatcatctttctttataattaaaaaataattaacaaatttcatatgtttatattttaaaagaattgggcgagtttatgaaaaaagctaaaattataaagacttttcttgctttcattactatgctttcgactctttttttgtttaatcagcctgttaatgcagccaataaggaggttgagactggctcagtgatgaaaaaaattaagcagtcgaaagaattagtagtgggcacctcagcggattatccgccactggagtttactaccagtgaaaatggcaataccaaatatgtgggggttgatatcgagttggcaaaagatattgccaaggatttacatgcaaagctagttattaaaaacatgagctttgattcacttttggtagcgctagagacaggcaaggtagacatggttatttcggctatgacacctaatcccgagagaaagaagagcgttgatttttctaagatttattacaagccaagtggcgaatatttcttaattaacaaacgcgatcaggccaaatacaaaaaaattaaagattttgctggtaaaactgtcggtgcgcaaactggtagtattcagtattctttgattcaaaagcaaatgaaacagtctaaggttaaaggcttaggcaaaatcaacaacttagttctggcattaaaatctaataagatctctggcattgtcatggaagaaatgactgctaaggcctaccaacaaaacgacaatagcttgatggctgtgagaagtgacttgcgtgaacaacaagctggtaacgcagtagcaattgctaaaggacaaaatgacttagtagctgctgtgaacaagactattaatcgcgttgaacaaaaagatttgattaataagaaatacttgcctgaagcagctaagtatatgaagacagcgcagaagacgaacacgatgactaaatatattccttactttattaagggagttggctataccatcgtgatcacgattttctcagtgttaatcgggatcatcttagggatgctcttagccttaatgcgtttgtccaagaataaattgctgcactggattgcagtttgctatatcgaattcattcgtggtacgccacaaatggtgcaaattttatttgtttactttggtgttggagcattaatttctaacctgtcagctgttgtagcggggattatcgcaattgggttgaactctggtgcttacgttgcagaagacattcgttctggtattgcttcagtagctaaaggacagactgaggcggctagatcattaggtctttctcaagctaaggcttaccgctatgtaattattcctcaagctttgaaaaatatttggccggcactaggaaacgaatttattaccctgctgaaggacagttcattggtttcagttattggggtaactgaattaatgtaccaaacggaattgattcagacttcgacttaccgtggtgttttacctttattcattgccatgattatttactttatcatgacatttactttaactagattgcttaattatttcgaaagacggatgaaacacaatgactaaaatgatcgatatccaacatttgaagaaaactttcggcaaaaatgaggttctgaaagatatttctgcggaagtagataagggccaggttatctgtattatcgggccatctgggtcaggtaagagtactttcttgcgttgcctgaatgtattagagcgtcctacgactggtaaaattgtttttgatggaacagacttggctagtctaaaggatggtaaggaacttgatcaattgcgggaaaagatgggaatggtttttcagaactttaacctttttcctaatatgaatgtaattgaaaatattaagttggcaccgatgaaagtcaagggtgttagtgaagctcaagctgagaagactggactagtcttacttgaaaaggtgggcttggccgatcgtgcaaaacaatttccagctagtttatcaggtggtcaacagcagcgggtggcgatcgctagagccctagcaatggatccggaagtaatgctatttgatgagcctacaagtgctcttgatcctgaaatggttggcgaagttttgaaaacaatgcaagatttagctaattcgggaatgacaatggtgattgtaactcacgaaatgggatttgctagagaagtagccgatgaggtctggtttatggctgatggctatttacaagaaaaaggcacgccacaggaagtgtttgaacaccctactagtgaacgtgcaaaagatttcttatctaaagttttataatcaaaaaggctcaagcattgcttgggccttttaatttactcatctgtaatgatggggtttgataatacgtactgtcttacgaaaaaattttgatgccatcctttttgaattaatgcattaaaaaaggtgttttgattattaggcaaagcagtggctttgggaatgatgacagcacgtaaaatcttgttttgaagtaaaattggtgattgcacatctgtttcgctatttaaattagtggttgcttgattggtcggcgtgttggttgtatcctgctgaacttgataatttgtagtgtcattagtactatcttgcttaaatagcttgaatctgtacttctgcacgcctttaacgtcaacttcatattcatgtcctgcaactaggttagtatttgcgggtgaataagttaggatcgttctaaaattgccgtagccacaggagctgtaattcttaacatgagctgcagtagtaacaactttagtatctaaatcagtgatagtaattgttggcttatttttaatggttctatctgataaatagagcgaccacatgatatttttcccttgaagcaattcaatagggaaaagacgcatgctaggataagcaactaccggctgactagcaggacgaaaagtatcattaatgtttagtactttttgaacggaatagcggtagccatttgtaccataagctgccccaatgcctgtagtggttaaacgacttgaaagtagccaagctcggtgaccggtatctgaaccagttaaattataatggtcagtaattaagtcagtgatcacatccccagcggtttgctgtgaaacattaaagtttaaatttgaagtttcagaagtgtctttagctagcttccaaacaaatttggagatattgcttggcttagtttcactaggtaaaccatgttggttaatgaatgggttagcattaattgcggccattacagcagccgtaatctgcgcgtttttattaagtgtatcagtagtcgagatagcgggcagactgaacaatgatcgatagtaattgatataatctgtttgcgttttaatgtattttggatctaagcgacctaccttaaattttttgcttagatttggctttttagcataaatatttgcggcactataactagttttatcaaggttcgcatattccttttgaaaattatgaacttcgttaacttcttgtgttgtgaatgtcgctgcttgtgtaacttgtccggcgagggggataaataaagttgcggcagcggcaatagaaaatttccgtagaagcattttagactcccttctatggttgtcagtatacctttcattataaactataaccaatgaaaaggctttagtgaaaaatattccactattttgcgcttttctggtattctttgcgtataattaaagattggaacatttaaaagaggtataaaataatgactaaaaaattacaagttggtttgatttttggtggtaattcatcagaatatgaagtatcaattgtttcaggccgcaacatctataaagcaatcgacaaagataagtttgatgtgcacccaatttggatcactaatgaaggctactttgctaatgaagaagaaagcttcaaggttttagatgatccttcataccaagttaagaacccacataaggttaacaacatttctaacttaattgaattagaaaacttgccagaaattgatgttttcttcccaattgttcacggtaacttaggcgaagacggtgttttacaaggtttgttccgcttgatggataagccattcgtcggtgatgacgtcttaggagccgctgtaacaatggataaggaattcactaagatcttggctcaaagagttggtgttccagtcgctgattggatttcaattaagcgttttgaatacgacgacaagaagaatgctaaacttaactatgaaaaggtagcagaaaaattgggccgcgacatgttcgttaagccatctaaccaaggctcatcagttggggttagtcacgtaactaatgctgacgaatatactgcagccttaaaagaagccttcaagtatgacgataaggtcttagttgaagaaactgttcctggcaccgaggttgaaacagctgtcttaggtaacgacaagccaattgtagcaggtgttggtcaaatcaccaatgcaaaaggttcattctacacttatgaaaataagtatgatgataattcaacttctaagttacaaatcccagcagatttaccacaagaaattatcgatactgttagagaaaatgcacgtaaagtttatgcagcaactgaatgtagcggcatggctagaattgactccatgctcaccccaggtggcaaggtagtcttgactgaagttaacgctttaccaggctttactaatatcagtatgtatcctaagttgtttgaagaagcaggtgttccttacagcgaattgattacacgcttaatcgaagcaggtatggaccgttttgatcataagaaaactttgcttcacaagcatgactaaacgccaaaaatatagaggtagatttcaatgacgactaacaagcatgattttgaagaattggctgcaccaaaagcagctgcacaagaattaggaattagtgttgccacgttaagaaagtattctttaatcgtggagaaggtgaccggcaagagcgactattttgctcggactaagcaaaaggctcgtctgtatcatcaaaaagatattgatgacttaaaggcttttcaccgtttatctaaaaatagtggcttaactttgcaagaagccgctcttcaaatctatgctgttagtgaaaagaaacctgaacctgaaactaaagaaccagctcctaagcccgcttataacagtaccgatgtaatggatactgagcaggtggttaagttgcttaacactttgcaaaagacaatttctaatcaaaatgaggcaattaattctttgcagaagcaattgaatgtcattcaaaagcaaaatcaagatttaattgaagcacaaaagcaattagctgcgccacaagatgatttagataagtttgcggctttgccagatatttctggaattgtgagtgcggatgaacctaaaccgaagagtgaagaagaaaagcgcgctgaagttaaaaaagacatgaataagagtcaagaacaaatgcatgacgagattatgtctaaggcaaaggaaaatgccaagaagcgggctacttcaaatgttcaccgtacactagaagatatgcaattaacggaccaaaaggaacactggtggcaaaaaatctttaagttttaaacaaattgattaagaatcaagagctgacctaacaaaaggccagcttttgttttacagtaggcgtataacaattaataggaagtagaagtaatgaaatttaaatggaaaaagcgctatacgatagcagttatcgtggcaattgtaggagcattattgacggtcttgtcctattttgccactgatatttaccacaaggacgacgttgccgtgattaccgatagcaagatcaaggatactttgattgaaaaaagtgaagatgtgtataaaaatgcggatgaaactcgccagcaaattttgcacttaaaagttttatcgggtaagcacaagggcgaaacttacacgactaaaaacgtgtattatccttcgcaattgacgacgcaaaagtatcgtgcaggtcagagaatttttgtcaatatcaagaagggtgatccagcgatcgttaatcctaagcgtgattgggtgttagttttggtagtgacaatcactttagcattgatggtggctgcagtagggaagcactcactctcgctggttgtgtcaatggtaatttcgtggctgatcttttatttgattatcatttgggatgtgcatttgaatggcgcccacattattttgctgtttggcttagctgatatcgtcttttcattctttagcttgctcattgtgcagggcttgaataaaaaaatgttggcgacttggttggcaacgctgctaggagtatttgtttcttttgccttgtgctacgtgatcatgaagttaacgggtgaatcggaaatgaaatatgagaccggtgactatgcaacgcaagatccacgaggcttgtttttagctcagactttgattggaattttaggtgcagtaatggatgaggcgaccgatattatttctagtttgtatgaattaattcaaactaaaaagaatattacgatgagacagttgattcatagtggtcgaacgatggggcaagaaattatgggaccgttgattaatgtcttggtcttaatttttattgctggtgcgctgccagaaactattttgtacttgcgtgataataatactttagcttcaacttttggctttactctgtcgctgggggcaacgcaaagtgtgatttcggcaatcggaattgttctgacggttatttttgcgacaggatgcagtttgttcttcttgaaaaaacgcgattggaagagtttgtttaaaaaagaaggtgagaataaatgagtacattatttgcattgatcgttgtcttagcgattttaatgacaatcgtcggtggtgaaactggaattcgtagtttttttagtgtgctaattaatacgattctattgatcttagtggcgatgctaatatcatggggaattaacattgcaattttgacgctgatttttattcctttaaagctagttacgattatctttttaggcactcatgactatacggtagcaaagaattcattttattcttccttcttagtgtgtttgattattagcctctttattttgggttgtcaatacctggctcaagctgcaggactaggaccagaggcaggagagttattggttggcttgtcgcagatgccgggcttgagttatccgatgattgccgtgacagtggcgattttctcaactttgggtgcaatcgcggaagccgcggtagcaatgagttcgggcttgctagaaatcaagaagcataaccctgctatcggtgaagaagagttgatggcttctggtacggttattggtaatgatgttttgggtacagcaatgaacacgattttatttgggatgttcggtagttttttatcattattcttatggtatttccgcttgcattacacgattggtgaagttttaaatgaaaaactttttgtaaatgaagcgttaattatcatgtattctttgattggggttatattaacagtgccactatcatcatttatgctatcaagaggaatgagcaagaaaggaccaaaacatgagagtagaaaatctgacgctgactaactttaataatcgtgaatatcaagttcatacatatgcgctagagcctaatcctgaattggttgagcaaaagcgcccgctagctattgtagtaccaggtggtagctttaatcacttatccaaaagagaaggcgaacccgtagccttagcatttaacaatcaaggcttcaacagtgtggtgatggaatataacttagtgcaagatccagacaaaatttaccctgatgcggggttagatgttctaagtactgtgaaatatttcagagaccacgctgatgagtatcagttagataaagataagattttaacagttggcttttctgctggcggtcatgtggtcagtgtagctaataacatggctttaaataaaaattatcagacaaagtatgattttgataagactgatgttttacctaataagacaatcttaggctatccgctgattgatattaaaaagattggttttccgattccagaagatcaaaaagcaaaaatgcctgtagaggaagagattttggatagtgcattaggtgttacacgtgaaacgcccgatacatttattttccaggcatgggatgatccggtggttttgatcggaaattcgattgaatatattggtgctttgaataagaataaggattcagcagaagctcatttgtttaaccacggttaccacggcttttcattggctcgtcacaatgtggaaactaaggggcaagattggcaggataatccgcacgcggcgcactggttcaacttggcaatggaatggctaaagagtgagtggggcgaatgatgtgaagcataaaaaatcttctaaccctaatgacaatatctatcacactatcgtcaagaatagaaaaattgaccgaatgattatgccttttgaagcggtgtactgcgtgtggctaatcattacgctggttcttagctttaagctatttgcttattcgattgacgcacaatttgtgctaatttctctattttttcttagcgggtgggtttcgtcattggttaagaatcatcgcatgaagaaaagtagaaaataagataagtaaaaagagttctcgcacgagaactcttttttattagaatcatttactttttatctctaaagaaaataacttccttagcagctacaaatggtccagatgacttgtaaacctttaatctaatagctttggcatcgacatttcttaagccaacaaccttattcttgctatcagacttccaagtcaagtgatcgccgtatggcttaaagttaacgccatcgcttgaaagctcgacactaacttcaacaggatcgccttggtgatcaatctttctaggtacccagcccattcgactcaagtgttccaaatgattaaaggtgaagtttaattcaagtggcttgtcttcgctgaccccatcaatggtttcccattcacttgctaacttcaaatcagtcaagtaatcaattggatgatccttaggactagctagactgctcgtgacatgaatgtcattaattgcatagttcattggatcgggcttggtaattgcgccaaacggatctgaccattctgaaactttgttgccagctacataacgcaaacgcagggtgtagcgggtatttggcactagttcatggaaagtaaatgaattaccatcaatgccatcatgtaaaatgccgttaacttcgatttgaacttggtcggttaattgcggccaaactactgttaatgaatgagagctaatcttgtctggatcaaccattggttgttttggtgaacgcaacagtgaatccgtaatagcgtgaaccaaagtttcattgccatatctgaagtttctgatcgtaatctcaattttagaatcggtaatatcgcgtttagctaacttaatttgtaaagcagtttgtttcttttcttggtattgatcaaattcaggcatccagctgtaatttgtgttaaagaagaagccttccttagcatgggcgaaggtatcaacggtaccgtactcctgcatcgggatttccttgtcgttgattttaacagtcaaaccatcaggataaccgtcacacatgatgttcaagttggtggtgttttccgtttggaaagtattgaaatcgccttgagttgggtcgatggtgatcgtcaatttgcttgcttctaaatcactcgtgatttgtgtagctacatggtttcttgaatagtcgttatagccgttatcatcgtaagtaaccattttactcttgccttgagggtagaggacatagttgcgttcgccgaggtcaaaaatagcgccgcctcgtacaaatactggtaaatgccaggatgggtaagactgcttattataaacgcgtccgcccaagtactttttgccatcaaataagtcaacccacattgttctgtggttaggcaagtaaaggttgtcttttcttgaattgccattaccatcttcgcgaccgttaacaattggcgaaatcaacaagttaggccctaacataaattcatggcccacctgtggggtgtagttgacttgttcatgtggaaattccaagaataatggccgcaagattggctcaccgacttgagcgcggtagattagggtatataagtaagtctgcaattgctcacgtagttttaaataggctcgattaatttgcgtcatcttactattgtaagcaaatggggtcttactaaatttaccttgatcgtctaagttgaacaggattggggtaaatgccttccattcaaaatcacgaatggcaatttgagcattaccaccgccagcggtaccgtcaacggcactaccaactaaaggctggcccgaaaggctagcccccaaaaagccagcaacttgtgttggaatgttttcccagttgccgccaatgtcaccaaaggctagcattgttctattttgactaccagcaataccagtattagagaaaatcaacggccgcttacgcttcaaattgttgcgtaaaattagcgcatcatttttcaatacttttggatcggttgtgtccgtttgaataaaggtggtatcaggtgaagccttcggtgtgttgttttgactccaaagaccagcgctaacgtcatgtatagcggcgtattcactgaagctagccatggcttcttcgttgatttcttgcacatcatagttaggcacgatccaacttaatttaaaatgctgcttctggtagcgatcaaccattgcccgtgctgagaattgatattcttcttcgccattcaaagagcccttgccactagcatcttctggcttgttagttctggtgtaataattaccgtcttcaaacataacagcattacgttccttagctttaccaggctgccataaggtagttaaaaagttgccaacatgacctaatcctagtgcatatttaggtggcatcagcggcttacccgttaacatgtaatactttgccaaaatatttttgggtgaattacctaatagataaaaggtatcaaacatgttggtgtcgtgctttaagatagtggcatccggattgcttttaccaaagtcataattgccagcactctcagtattgcgcaattcaccaaagccggagttagcccagaagaatggcacttgggtcaaaacgccgcctttaccggtaatcttgtcgcgcttgattgaaatgatttcacctttatgactgaagtagccgttctgcatcccgccaccaaagtaaaattcattcttgtgttgcttcaaaatttcggtagtttgatcattgcctaattcaagtggactcagctgaaccaaacgattgcggtgcagcgtctcgtcaaagatgctcattacggctggcttttgttggaaaataagttgataattgccagacttaatgattaaggaatcgctggttgccttaggctgtgatttttcaaaatagtcattgttgaattgagacaggtcaacaaaagatgagtgattctcgtcaaacttcttagctggatcgagaaaatatctgaagatcccgtcagctaaaatataaagacgaacaatatcgccggtggagtagtgaagttcataataatgatcacgtttgttggcaccgataagttggcctagttgatgtctttctatttggttttgtgtcatatttattcttcctatttaaacttgctaccttatattataactaaaaatcaaaaaacttcttaagcaattgtatttactaatatgcatcaacaaaaaaagctctgctattatgcagagccaccgcgcgtttgcaagttatcgtcttactgcgcatgcatccatgatcattggacgcgacaatcttcctatgcacattatagcatgataaaaatacgatgcttaaactggtatttaccaattttgttagatataattaaattaacaattacgatttagacatataaagaaagaagatatttatgacttattacattcatgcagataaatttttcttagaaaacagaacagaaaacggcggctatcttgaagttcaagataatggcaagtttggctttttctatccagaaagcaaaaagccagaaggtaagattgtcgattatgctggcaaatgggttgcaccaggattagttgatacccacattcacggctcattgcgtgaggatgtaatgaagagtgattgggaaggtattaataagatctccaagggcttgcttagtgcgggggttacttcatggatgccaacaacgatcactgctgcaagcgataccttaactagaatttgtaagatgtttgcggaccatcaaggacaagaagaaggggcaaagattcaagggattcactttgaaggaccattcttcacggaagaacatgctggagctgaaaatcctaagtacatgatggatcccgatattaatgaatttaacaagtggctggacgcttctaacgggatgctgaagaagatttcaatggctcctgaaagaaaaggttccaaagaatttattcgtgaagccgttaaggaaggcatagtagttgttttgggccactcaagcgctagttttgaagaagcagtcgcaggcgttgaagcaggtgcaaccatgtttactcatacctttaacgggatgcctgatccaagccaccacacgccatcaatttctaatgcggcaatgacgcttaataatgtgaccgatgaattaatctgtgatggccaccatgtgcaaccatgtatggctaagactttgattaatgcggttggtcctgaacacattgccttgattactgattgtatggaagccggtatgatgccagatggtgattacatgttaggtgaattgccagtctatgtaaaagatggcatggctcgtcttaaggatggcgacaatttggctggatctatcttgcaattgaagcaagccgttaagaatgtagttgactggaatatcgttactccagaaaaggcagtgatgatggctagttatgttcctgctaagagtgcccatatcttggacaattgcggtacaatcgcaccagataaggatgccgacttcttgattttgaatccagatttgaccttaagtgaaacttacctaaatggtgaatcacgttataaggcttaatttgttagtctagttttaaatagtcctcattagattgagggctattttttgaccctaaattttggcaaatagtatacaattaataatagtaaagtaggtattatacattaggagaaatttattatgccagatggaatcagtcaattactagtactttttatgtaataactttcaattaattgaataatttgtactcttattgattaaagaaaagtatcacatatgtttcatgaatctcgtctagccaagtaggtgagattttttattacgtttctatgtaatcgctttcaattttaaaacaaatgtgctatattatgagtgtaaagaaattaagaaataaaaatattaaataagtttaagtaaaaggagagaggtgagttccgatgggcacttgagagtagaaagtcatatatatagaaaggtttgtgataccaatgggcatcgtaaattgaaaataaaatgtagttcaataatcatcaagtgatattaatgtacataagaggccgtgaaattattagtaggcatagaataatacgcgtggtgctagttaaatcgttctaggcaatatgccatattataagctaaaatggctatttctagccgctgctgaaagccagctaagctccttgctcggttattttcagcgttatagtaactgagcaaagaaaagtcgctttcaattgttcttctaattgccatcagttgatgattattatgttttttagcacctttcatgttttttcgatatggtgtccaaaggacatagcccataccttttaactcggcagctaagtcttttcctaagtagccttcatcgcctaaaagataatggttaattggatgagcattaatcatcaattctactgtttctttggcatcatgcactgatgctttagtgactgcgtagtcaagcaaatagccatcatcgcttactagcgcgtgcaccttgaaaccataataatagactttcttggttgctttatagccaatatcggctatgtcacggaagatcttaacacgataattacgaacaggctgacaaactggaacaggaaaactgtcaataattaaaaattctccagcaacctttacctcttgattccaagcttgacggatgcagcgaattaaaggcaaaagcatcttggctcgacgattaaagcgagaatgagataagccaacaaaaaatttacagaatcttctttgggattcaattccaatttcagtttgccaaatgagcatcgctaagatggagctgtcggaaagctttgtttgatcaatgttttttcgatgcgtaagcttatcaggcgcataaagattatatagtgaacgacaaattacatttaaacgactaaaactaacttgtaaatggtgagagaaacgattaagcttgaggtagttcaattagatcagactcttttctatttaatttacttacaacttgagtctaatccgattggacttttttattaactaaaacgatttaactagcaccacgcgtagaataataactatttgatgaatcacttggattaggattaagaaagattttcatacatgataaatattaataagaaatgacccttcgctggaatgaagtatgcgaagggtcatttaattttggcttgaaaaacgtttggtatttagcattattgttatttgttaaatataatatgaagtacatgtactaggccgatagagaggaaagttatgacaacagactcaattaattttaaaatcgatgcagaaagtaaaaaggtgatgattaaagaattagcaattattaatggcttaattcctgatgatgataatacagtagataatctaaatgattattttaaaaacttaggaatttaatggtttattggtcttttatctgatgtagtaaatcatgatttagtaagtcgtaatttagtaaaatataatttagaagatggtgatcttatgtttattggacgaaagaaagaacttactaaattagagcaatttaattagcgtggctaaaagatattactacttaaacttcccacacgcaaaattgcttgtttcattgtgattctgcgtgttttgacaaatataaaaggcacaagtccttttcattgctataattatattgaccaaaacataatttatttgcatgaaaggcttgtgccaatgtctattttaccatctcctgaccaacaaaatgaacaactattttcaaactcaatcatcagcttcatcaagaagtttcaggtgatcaagctgttgagaaaatgtggcttccgcaaggaaaaaggcattagcctgttcagcttgtttctttacgttttaagcaatgtctttcgtgaccgcagcttatatatgcagctgaaaatggatcattttcaagaaaatttttccaagaactcatattaccgttttatgcgcaacgttcacgtcaattggctccacttcaccacacttctgtctgcgcaaatcattaataaccacttgcgatctttgacttcagaaaaacgggctgattgctttgttgtcgatgattcctacttctctaggaccggcttcaagaaaacagaattagtcgccaaagtttttgaccatgtatcaatgacttacaagaaaggttttcgcatgatgaccctgggctggactgatggagcttctttcatgccaatcaattcagtgctgctgtcttctcagaagctacagaatatgattggcgaaaataaagtttttgatcagcgcaccattgctggccaaagacgtatgcttgcccggactaaaggcacagacgtgatggttaatttaatcgaccaagctatgaaagcaggtcatcaagccaagtacgtgctgtttgacagctggttctcaaatccacatcaaatcgtccagctcaagcaaaggaagctggatgtgattgccatggttaaggttagctccaaaatcaaatatgaatttgagggagaacgcaaaaacatcaaacagatttatcgcagctgtaaaaagcgatgcggccgttctcgctacctgctgtcaatcccagtcaaagtcggacgccaggacaaagacggtgctaaaatagatgcacggattgtctgcgttagaaaccgtgccaatcgcaaggattggctggcaatcatttgtaccgacatgtcgcttagcgaagatgaaattatccgcaactacggcaagcgttgggatattgaggtttttttcaaaacttgcaaaagttatctaaaactaagtacggaatatcatggcctgtcttacgatgctttgaccgctcatgttgccatagtttttactcgctacatgcttatgtcagttgccaagcgggacgatgaagatgaacgcacgctaggcgagctgttctattgcatgattgatgagctggcggacattacttttagccattccttgcaattgattactgatgcaatgctggccagcgtaaagcaagtctttcatgccagtgaagcacaaatagctgaattcacggctgactttatcaatcgtttacccaaatacatgcaaaaattgttaaagaaaactagcaaaaataatatagaagcctaaagccaagcaagatcaagagattactggcttatttagtgtgggaagtttaagttactacttgttttcaaagtcaggctttacggattcatgtacggaactggcagaacaagtggggtgcaagttgattagttttgatgaaatgtaatatcatttttcctattatttttatctgttgtgatcggagtaagtactggtgtttaaaaaaggcgataatgttgtgttaattctaaagcctaatggcaatcttgaaatgaaaaaagaaaaaactaatttttgggacgaagtatcaaaaatgtctgctaaagaaaaaagattgcagattgaagatttgggatatgatccattagaacaaagatcaaaaggtagagaaagaattgaggattaaaagttagaaaaggttcttggaatcttttttgatgaatttaggtaatctgaaaaaagaaacggcaccgctagataattagcgatgtcgttttagttatgcttagctatattagtatgtctgcttaatttatttaataaactgcgccgtcgtagaagttgtaacgagggcggttgaagtcgaagtcttttaattcactgatcttaattgcgttatcgcaaacaccccagctcattaagttgattggcttaccgtaatctccatcaggaattaccaacaagatgtacttgccttttgaaagggcatagccaagttccattcccagaccaacatcttcttcttcaggcaagtaaacgccaagcatgatgtcgctggacttaatccctactaagtcgttatggtaggtagctgatgcccattcaatgtcgtgcaagtattcagggtgttcatcaacgcggatacccttatattgattatcaagaggtacgtagctgttttctaagtcaacggtaggattttgctttagagcttccattgcttctttgtaagccttattttgcttttcgttgaaccaaccggcaccaaagtataaagtttttgtctttgccatatttttctccctttaaaaatgatttaccttaactttaccatcttttgggttgaaaaaaacgtcttgttaacttatggtgaaaatgttaattccacattagtaaggaaaaatccaatgactaatcaaaatctttttgcacctgatgcagtatttatttctaatcaaactaagcaagatttggtttttaaagaagtttacgagcatttacgcgaaagtggctatgttaagggaaactttttacaccatattgtcgaaagagagcataattttccaacgggattggatactgcaacactaggtaaaaatattcctaatattgcgattccacacaccgagggcgagtttgttaacacgagactgattgttccggttgcgctgaaaacgccagtcacttttcataatatgattaatcctagccaagcaattgaagttaaatttttattcatgcttttagataatgacccagatgggcaagctgcattattagctcaagtgatggattttttggctaatacgccagccaacgaattgcgcgaagtttttaattttactgatcctagcgcgatttatgcctttttagagcaaaaatttggtaagaaaaaagaagactagtttttagccttctttttctaatcttcaagataaatattacgcaacttcatgatgtctgcacttgagagcttcattacatcgcgtaggtagttattaataccgccatattcatcgtttagtactttaacagcatggtcaaggtattcactgcggacactctgaatgtcacgaatcgattgcagcacattttcatttttaccattttgacgggcatgttcaaccatactgtcgacgaaatccttggtagtgatgttggttaaaagatagtctttcttaatcgtatttagtggtacgccaagagcagataatgcaagtaatgcaccgaagccggttctatccttgcctgcagtacagtggaaaataacactttcgccatccaccgtattttcaagcaagacatcgaagaacttgcgatatgccttttgtgcaggttcactttcgatcatgtcttcgtaagcataatgcatgtgattgaagccaaaatcagcgtcgtcgtgtgcttgtgtatctaagtcagttaaactcttggatgaattggttaagtcttcactgaaaacaggatcgtaaatgtattctacgccgtctgggacacggtctggttgattatcaacttcttctttactacggaagtcgacatcgtatttaacgccgtaatcagtcaaaaactgcttgtcgaatggtgaaagatcggctaagttaccagttcttaataacttgtgcatcttgattttcttgccagacatagtttcgtagcctccaagttcacggaagttgcgtccactagttactccgattaattgattagttaattttttagtcaaaaaaattctcccctttctgttaatgaatgtcatgaatattattttagcaacaaatcttcaagcaaacaatcaattaaaaagtaacggctttcaaaattatgctaaaataaagggtaagtactagtgcaatttataggagatgaattaacgtgacagataaaacaaaagaaagcattttagttccagttgatggctcagaatcagctgaaagagcctttgacaaggctgtaaaagttggtttgcgtgatggtgctcatgttgatgtattgaacgtaatcgatacgcgtcaatttatgggtgaaatgcaagacactttgatttcaggagataccatttaccaaatgactcaagattctgaagaatacttgaagagtttgaagaaatgggctcacgataacttcggttttgacgatgttgattatcacattcgttatggcagtcctaagcgcattatttcttacgacttcattaaggaccaccacaatactttaattgtgatgggtgctactggtttgaatgcagttgaaagaatgttgatgggttcagttactgaatacgtaaaccaacatgctttagctgatgttttgattgttaaaaccgatatgggaaacaatcctcttaagccaactatgaaaaagaactaatataagaataatcgccaaatgattctaaattcattggcgattatttttttgaaaaaagttgcaaaataccttgatagaacacgaatgtttctggtattattttatcaaatgaacgtgggaacgaaaaaggggagtgaaagataatgtttatgcaatcagaacaatttattgcaaaggatgtgtctttcgctcgtaaagacgttttttctgttcgtttagttattagaaacgtcattaattaggcttaattattgatcgcctttggcgacccgtaattaagtctttttttgtgatgtagagtagtttgttttatcactgtgtatttatgtttatggaggacataatgaaaagatttagaagaatcttggtagcagtagttgcacttcttgtagcagtagttgcaactgcgtgttcaaacaagagtaatagttctaagggtggttataccccaaagtcattaactattcaatttgtaccaagtcaagctgcaactaagttgcaagctcgtgcaaagcctcttgaaaagatgctttcaaagagattgggtatcccagttcacgtttctatgtcaactgactacaacaccgttgtggaagctatgaaatcaaagaaagttgatgtaggttttcttccaccagatggttatgttttagctcacaagcaaggcgcagccgatttgcttttgcaagctgaacgttacggtgttaagcaaccaggtggtaaagcaactaaccaattagtaaagagctatcgtgcagaaatccttgttaagaagggttcaaagatcaagaactggaaagacttaaagggtaagtcaatttcagtacaaaacccaacttcatctgctggatacgtattcccagttgctgaacttaagcaaaagggtttggacgtaactaagagttgtaagttagttactgttactggtcacgaccaagctgttttgaacgtattaaacggcgatactgatgcagccttcgtctttgaagatgcacgtaacatcgttaagaaggacaacccaaagatcatgagtcaagttgttccaatttactttactaagccaattcctaacgacactatctcagtaattccaagtatgtctaagtcattccgtaagaagcttgctaaggcattcatctctgtagctaagtcaaaggaaggtaagaaagttatcgaaagcgtatatagccacgaaggttacgcatacgcaaaagatagtgacttcaacgttatccgtaaatacgacaagatcgttgaatcaactaagaaataataaatttaattaagggagtttgacgattaaatggcagataagccaatgattcaattaaaagatgtttccaagatctacgacaatggtactgtaggtttaaagggcatcaacttaactattaataaaggtgaattcgtagtagttgttggtttgtctggtgctggtaagtcaactttgctacgttcaatcaatcatttgcatgatattacttcaggcgatattttgattgacggcaaatcaattacaagtgctaaaggcaagaatttgcgtaaattacgtcgcgatatcggaatgattttccagaactttaacttggttaagcgttctagtgttttgcgcaatgttttggtaggccgcgtagcttactacccaacttggaagactacttttaacttattcagtaaagaagataaacaaaaggcttatgaagctttacaacaagttgatttggccgataaagtttatgcacgtgctgacgagttatcaggtggtcaacaacaacgtgtagctattgcacgtgtgcttatgcaaaatccaaagatcatcttggctgatgaaccaactgcatcacttgatccacagacttcagtgagagtcatgaatgacttgaagatgcttaatgaaaaatacggcatgaccgtagttgctaacttgcacagtatcgaacttgcacaacaatttggtgaaagagtaatcggtatccgtgctggtcaagtagtttacgatggcaagatgaaagatactcctaagtctgtcttcactaatatttacaatggtggtaacggcagcgaggaggatgaataatgcctgaacaagtaaatcaattgcctaagcgtaagttcaaagtaatgaacttggtttggacaatcatcatgattgcaggactatttatttcaatcaatgttactaacacgcacattagtgtcttgtttgaaaactggaaccaatttgctgacatctttattcaaatgtctcatccagattggagctacttgaacgttgtttggcctaagttgattgaaaccatcaagatggctgtcttgggtacggtaattggatctgttgtcgcatttatctactcattattgattgcccgtaacatcgttaagaacaaggctgtgactggcattcttcgtgtgatcatgaacattgtcagaaccattcctgacttgcttcttggtgcgatcttcgtagctatcgtaggtatcggtccagttgctggtatcttggctttagcagtcttcacctttggtgtggttgttaagttgttctacgaagcaatcgaaacaattgatccaggtccaattgaagctttgactgccgtaggtgcaaacaaattgcaaattatccattacgcagttatgccacaaattatcacttacttcatttcatatgttctatatgcatttgaaatcaacgtcagagcatcaacagtccttggttatatcggtgccggtggtattggtttgaacttgcaacaaactttgcaggtcttcaattacgctcaaactggtacgatcatcatcgttattatcgtagttgttgtcttgatcgactacgtttcatctaagtcacgggaggagttaatgaaataatggatactacaatgaaaaaattacccgctaaacccgttgaccgtaagaaacaagttgcacattggctaattgcaattgccactatcgtaattattgtttggtcatgtactggtattaacttcggtggtattaaagccactgctggtcaaattgccggtgcaatcttctcaggtattttccatcctgactggagctatgtttacaatggctcaggtgaagacttggtctcacaattgtggcaaaccatttgtatcgctttcttaggtacattcatttccgcaattatttcattgccatttgccttctgggcagctcacaccaagcacaagcattggtacacttcaagaatcggtaaaattgttttggcaattatccgttcattccctgaaattgttcttgctttgatgttcatcaaggccgtgggtcctggttctgcagccggtgttttggcattaggtttccactcagttggtatgcttgccaagttgttctcggaagctattgaaaacttggaagaagggccaaacgaagctgttattgcagccggtggttctaagttccacgtaatcatgttttcaactatgcctaacttgatgccagctttgatttctaacaccttgtatcgttttgatgtttccattcgttccgcatctatccttggtttggtaggtgccggtggtatcggttatccattgattattgctttgcaatatcgtcaatgggaccgtgttggtatcattttgctagggatcatcattatggtggtgatcatcgactggatttctggttggatcagaaagaagttagtctaattcccaaaatttgaatattaaagaaagcgaagacgaaaagtcaatgtcattaagttaagacattgacattatatcgacagcttttaaagatcgaatcattttgattcggtcttttttctttttaaaataaaaagtgagcagagtttatttgcctttctgctcactttcgtcatattatctggtctttcatagaaagctgtgcctcttatgaaatcccttcactcaaatattttaaagctgatggatagtattatcaataaaatcgctgacaacattcacgatttctctgtatctgatcaagcttttactcgctgtcgtaagctcaattccactgatttgattaagttaattcttaacatgggagctggcagcctgaattcggaaatttttcatgcttttcctgacataaattctagaatgactgcttcggcttttgaacaacaaaaggctaaattaaagcctgaatgctttaaagaaattatgttagaacttagccgggcaaataatgtactgcaattattagataatcaatacttagttgttgcgattgatggctctgattttgatcaaccttttaatcccgaatcagaaaatatttttcgaggtaaagatggtcgaatatactgtcaacttcatgtaaatgctctttatgatgtcttgaataaattatatttacttaaacttcccacactaaataagccagtaatctcttgatcttgcttggctttaggcttctatattatttttgctagttttctttaacaatttttgcatgtatttgggtaaacgattgataaagtcagccgtgaattcagctatttgtgcttcactggcatgaaagacttgctttacgctggccagcattgcatcagtaatcaattgcaaggaatggctaaaagtaatgtccgccagctcatcaatcatgcaatagaacagctcgcctagcgtgcgttcatcttcatcgtcccgcttggcaactgacataagcatgtagcgagtaaaaactatggcaacatgagcggtcaaagcatcgtaagacaggccatgatattccgtacttagttttagataacttttgcaagttttgaaaaaaacctcaatatcccaacgcttgccgtagttgcggataatttcatcttcgctaagcgacatgtcggtacaaatgattgccagccaatccttgcgattggcacggtttctaacgcagacaatccgtgcatctattttagcaccgtctttgtcctggcgtccgactttgactgggattgacagcaggtagcgagaacggccgcatcgctttttacagctgcgataaatctgtttgatgtttttgcgttctccctcaaattcatatttgattttggagctaaccttaaccatggcaatcacatccagcttcctttgcttgagctggacgatttgatgtggatttgagaaccagctgtcaaacagcacgtacttggcttgatgacctgctttcatagcttggtcgattaaattaaccatcacgtctgtgcctttagtccgggcaagcatacgtctttggccagcaatggtgcgctgatcaaaaactttattttcgccaatcatattctgtagcttctgagaagacagcagcactgaattgattggcatgaaagaagctccatcagtccagcccagggtcatcatgcgaaaacctttcttgtaagtcattgatacatggtcaaaaactttggcgactaattctgttttcttgaagccggtcctagagaagtaggaatcatcgacaacaaagcaatcagcccgtttttctgaagtcaaagatcgcaagtggttattaatgatttgcgcagacagaagtgtggtgaagtggagccaattgacgtgaacgttgcgcataaaacggtaatatgagttcttggaaaaattttcttgaaaatgatccattttcagctgcatatataagctgcggtcacgaaagacattgcttaaaacgtaaagaaacaagctgaacaggctaatgcctttttccttgcggaagccacattttctcaacagcttgatcacctgaaacttcttgatgaagctgatgattgagtttgaaaatagttgttcattttgttggtcaggagatggtaaaatagacattggcacaagcctttcatgcaaataaattatgttttggtcaatataattatagcaatgaaaaggacttgtgccttttatatttgtcaaaacacgcagaatcacaatgaaacaagcaattttgcgtgtgggaagtttaagtatttagacatggttatccaacccagacaaaaaatggatgaacgtgaggcagccttaactatgttaaagaaattagcccaacaagaaaaagatttcttagtcctgatggatcgtggctatattagctttaatttaattgaaaattgcaatcgattaaaacattgccactatgttatgcgatcaaaatccggagatggtgcttttaaagaaattgtagctatgtcgaatcatgaatacgatattgacttatcatgcagagtaacttcgtcacattattattatgtcacccataaagatacagaaaagtttcttcacctgattcttcacaaaaagcatcactataaagctgttcgttcaaaaaataccagagatcaacgctgggattttgaggatatgtgtgatgttagatttagagtttgtaagtttagaatcaatccaccaggttcagacgatgagtgggaagtcctcatcaccaatttatatcgaaatgaatatcctctagctagaatgaaagagatctatcatcttcgctggggaatagaaacttcttttagggagcttaaatatgacttaagcggcatacagtttcattctaaaaaagatcaatttgtttatatggaaatatacgcccattttgcaatgtataatgccgtgagtttatcaataattgcgagctcaaaaccgtatactcagggaaaatatcaatatcaaatagattttaaaatggcctgttgtatctggcgacgatattttagtataagtgataattcagataaaaacttcacacaattactgctggatgtggcattttatttaacgcctattcgaccaggaagaaaagataaacgaaatctaaaagttaaattagtagttggctttccttatcgtctagcagcttgaactaatttaaacgactatcttaagatggcttatttgtgctatcaaaaaagacatttatcgaataaaataattcgataaatgtctcaaaaagtgtcatcagattagtcaatgtcttaacttaatgacattggacgaaaagtccccgcttttttgttagccgtgaaatttaaattggcattgattaagatgatcattaattaatccgattccctgcaagtaggaataaatgactacaggtcccacaaaggaaaaaccatcttttttcatttgtttggatatcttctgcgataggtcattagaagcgggaacgtcatcaaagctggcaatatcatgcacaattggagtaggtacaaaattttgtaaatatttggcgactgaacaatatttttgttcaattgccaaaaatgcccgagcatttttaacagcagcattaattttcattcgattacggataatgcccttgttttgcattaatgactcgatatctttatcggtcatctttgcgacttcagagatctgccaatttttgaatgcagctttaaaattgttgcgtttatgcaaaactgtggaccagcttaaacctgattggaaaagttcgagcacaagcatttcatacaaatgtgactcatctagattaagtttgcaccattcatgatcgtgatactcctgtactgcttcgtcttttgtatcgccccatggacagcgaataatttcttgattcatatttttctctctttctatgtaagtaatgttttacccctctattatttattacgcaaaaaaatgcgattattttttgagaaattatatttttatgtgcgaaataagggttttaacagctttttttgctataattaggtgtgaatttcgaggaggatcctatggaaaaattagataccatgatgttggctgatgatttagccttatcacaagataaaattttaaatggcgaacaagactttggcgctgaagctgtttacaaagtaatcgataacttgggcgttttaaataacccaatcaaggattacttcgacatgactgaagaacaatattatgaagctgaaagcgatcacaaactaactttgatcaagatggacagtaagttgactgatttgcatgatcgcattttaactaaccatgttgatggttttgttgataaggacgagatcaacttaacctacaatcatgagaatccatatgaagatgatttatacgatccaactactgattatcgtgaaattgtttacagcttgaaagttattggtgcggttcaagcaattgcagctaaggacttgcaagaagtattgtctaaagatgctgtattatcaattggacttgccgcatatgctttagcacacaacgcataaattatttgagtcggctggtaagcggccggctttttttgcttttttgaggcgaaaagatgaatttgtttaaacacacaaagggaatagttgatcgaatcgttggcgccaaaaaacgctctgcaatggataaagatagtgaattgcttgatccgatgcaaaaatatactactgttggagaatatcatgttggtgccgttgatggtactccacatggtaaggactatgttttaaccgtttatcaagacgaagacggcgtgttgcgacaagcacttagtccagagactacaacgaaattagcaccggaatatttacgcaagtataatgcgaaactaggtcattttcgtgcctttcataataagaagacagggcgccgttattgggtggaaaattacttggataatttcactacggaagtgaaaaagcatattcgcccaggcactaattcggtcaatatcggtgtaattacagatactcactttaaagataaagatagcagcgatttttatggctttaatgggctgcaacatgtgcaagaattttcttatttagatcaatctggcttgctagatttaaaagtccacttaggtgactggatcgatggctccgatgctggcctggtcagtgaaagtgaattggtcaagctgaacaagtcttttaagtcggatcaggtgccatatttgagtatcaagggtaatcatgatgaaaatgataagtttgatgaacatcatgatttaaaagcctcatttccagaaaatgaattcgaaaatattatgtggcccgatatgtaccgacaacgaggaattcattatgtttcgcgccagcacggggtggcatactttgatttagatgacgtgcgggtgatttcagttaatacgtcagatgttccatatgaattaaataaccgcgggcaaaagcgctatgacaataagattgtattggctgtgcgtgaagatcaaattgaggaaattatcgaaattttggctaattcttccaacaaaaagatcatcttcatgtcccatgccaacccgattaatcgaaaggggtgtaatgcacttaagtataatggccgctctttgcacgaactgctagttgcttttaatcaacgtgaaaaaggtcgaatgcacgctagcaatggtgttccagcagaatttcgtttatcaaatagttttgattttaccaatatcaagaatgcgagaattattgcctacttctgtggacatcggcatcgtgaataccagtatcggatcaacgggattcaatatattttgtttaactgttctgccttgatggggccaaatcattcgctaacaactaaatacaacaaaaacttagaccgaagaattgatcaaaataatgaatttgcgggttatattgtgaacgtcgatttaaaacgacaccgcattcaatcctttggctatggtgcagcttctagacgccgggtgtatttcatttagttaaggaatagtaaaggtatttggctattacaagtgtttagcttataataaaaaggttaaagtaaaaaatagtgaatattatagcaaatattaagatttagagaattgacttaggggaatttaaattatgtgcggaattgtcgcgttttatgatccaaagataaatgaaaagcaggctgtcattggcaaaatgatggccacgattaaacaccgcggacctagttccgacgggtattatactaatgacgaggttgcccttggttttagaagattatcaattattgatcttcgtgggggtagccaacctatttataatgaagataaaactagagcaattatttttaatggtgaaatttataactttaagccattaagagaagaattaattaaagcaggccatgattttactactaaggctgatacagaagtcttacttcatggttatgaagaatggggcatggatggcttgcttaagcgtgtacgtgggatgttcgccttcttaatttgggatgacaacaacaagaccctttatggtgcacgtgacttctttggcattaagccaatgtactacagtaatcaaaatggccatttgttggttggttcagaattaaagagctttttggaatttccaaagttcaagcgggaattaaatgttgaagcagttaagccatacttgatgaatcaatacaatgacctagaagaaaccttctttaagggcgtttaccgcttcccagcgggccattggtttgaatacaaagatggtgaaatgaagacccatcaatattgggatgctgaatataaagaaaatagcctttcctttgaagaaactttgcaaaagatcaacgaagatttgaaagaaacggttgatttgtatagaaacgctgatgttaaggttggtgctttcttatcagaaggaatcgactcttcatacttgactagtttgcttaacccagatgacgttttctcagtaagttttgatgattcaacttatgatgaagcttctaaggctaaggcattagcagatattaatcactggaagttcttcagcgataaggttgatgctgatgaagcaatgcgtgacttcccagaaatgcaataccacatggatgaaccagatgctaatccgtcaatcattccactctggtacttgtgtaaactagctcgtaagcatgttactgttgctctttcaggtgaaggcgctgatgaattgtttgctggttatgtgaactacgggatgcatacgcataacgacattattaaggtctttacttcagaattgaaaaagttgcctgagaagaagcgggttaaattggcacacaagattaagagaatgcctaatttcccaggtaaagttcacatgtacaccaatttagctgaaccgagtgaattttatgtcggtcaatcggttatctatgacatggattacccaactatctttacttctaaagatgctaatagcattttacagccaacgtatcgcaataaattgactgttaacggcatttaccaaaaagactttaagaaagtaaagggagtcgataatgttaagcagatgcaatacattgacttgcaccactttatgcttaacgatattgaacaaaaagctgataagatttcgatggcccattcacttgaagttcgtgttccttacctcgacaagaagattgcggaattggctaactctatcccaaccaagtacttggttaaccgtcatgataccaagtatgctttgcgtaaggcttcagaaaaagttttaccagatgagtgggctaagagacctaagcttggcttcccaactccaattaagcaatggttgaaggaaccacgtttttacaaacaagttcatgctctttttgaagaagaatttgtcaacgatatttttgaccaaaagaagattatcaagttacttgacgacaactatgaaggtgatggctcacatagacgtcaaatctgggctatctataccttccttgtttggtacaagttgttctttgttgattacgaaaacacagttaagaaatatcaacacgtgcaacctgaagttgctaagctaatttcacagggtaaattactataattctagggagattttttgaggatgagtaaaaaatttacgccgatcttactcggtagtgatatcaacgtgtatggtatggcacgttcatttaatgaagcatatggcattaaagtgaaggccttagctgacgttcaacttgctgctactcgttattcaagcattgtggacgttgaattgcatcatggctttagtagcgatcctacttttatggacgtgatgcacaaaaagatggaagaatacaagaatcacgaggagccagttatcttgattgcttgtggtgatggctatgctgagttgctttctaagcaccaagatgaattgaaaaaggtctttatcgttccttacataaaatatgacttacttgaaaaattaatctctaaggaaggcttttatgaaattgcggaagaatatggcttgccttatcctaagactaagatcattacgatggatgactacaagtcaggtaagtacgaggatgtcccatttgatttcccagtggaattaaagccggaagatccagtttcatggttgaagtgtcaatttgaaggtcggaagaagacttttgccattcaagataaggctgaatttaaggatatcgtaactaagatttatactcatggctacaacgctgaccttattttgcaagactttattcctggtgatgattctaacatgcggaccttgaatgcttatgttgataagaaccaccaagtaaaaatgatgtgtttagggcacccattattggaagacccaaccccacaatcaattggtaattacatggcgattttgcctgagtacaatgaaaaattgtacgaagaagtacaacaattccttgaaaagttgaactacactggtatggccaactttgatatcaaatatgatccacgtgatggtgaattcaagttcttcgaaatcaacttacgtcagggacgttctagcttctacgtaactttgaacggttacaacttggctaaatggtacattgatgactatgttgaagatgccttgaaagataaggaaacagtttatggtaataagcttgaatctaaatacaagctttggttaggcgtgcctaagaagatattcaataattatgcttatgacaacgactataagacgactgctgacgaacttattcgtgagggccgctatggtactactgtcttttatgacaaggatagaaacttcaagcgctggttattgatgaagtacatgttccataactacttcaaacgttacaagacttactatgaagttaataagggtaagatctttgacgaagaaaataaaaaattaaacaaatagtttaaattgagaggtaaaaaatgcctctctttttttctaaaaaattttagctgaatcatttcccaatttaatggtcttttggttaatacaagatatattcatctatatttgaacacaatacaagatgttgtgttttatgctatgataaagacacgagatttggagtgattgaaatgctaaaagaagaatttaaccaacaaaatgtaacaaaatttaatacgcctaaaacttttgttaaacgtgatgggtcaaagtatccgttcgcaatttttaaactcaacatggttttgcataacctagatttagataatgtagcacctgctgtaattgaaaaaattgtggctaaactagatgctgctgatgaagtaaatgcacaagatgtagcagttgcttttagagatagcctaaatgagttgggttatttggatgaagctaaagcttatgtgcaataccgcaagcacgatgaagaggaatggattaaacaaaccgatactcgtgcacggttaaagcgaatggttaatggtgacccaacgattgttaacgagaatgccaacaaagatagtgaggtcttcagtactcaacgtgatttaactgccgggaccgttggtaaaacagttggtttgaccatgatgcctgagcacattgctaaagcccacttgcgcggtgatattcactggcatgacttggattacacaccactttcaccaatgactaactgctgtttgattgactttaaggatatgctaactaatggcttcaagattggaaatgcctatatgactagtcctaactcaatcaatgtggctacacatcaagttacgcaaattattactaatgtagcttctagtcaatatggtggctgttcttttgatcgagctgatgaagtgttagctccttttgcagagaaaaactaccaaaagcatttaaaggatgctggcaagttcattgatgatcctgaaaagctggaagaatatgctaagagtcaaactaagaaggacatttacgatgccatgcaaggcttggaatatgagattaataccatgttctctagccaagggcaaacgccatttactactttaggttttggtttaggtacttcttggattgaaaaagaaattcaaaaagatatcttgcgtatcagaattaaaggattgggtagagaacgcagaaccgcaattttccctaaattagttttcaccattaagaagggcttgaacttacatccaggggaccctaactacgatgttaaacaactggctattcaatgttcaactaagcggatgtatccagacgttttaatgtatgatacgatcaagaaaattacaggttctttcaaggttccaatgggctgtcgttcattcttacaaggctggaaggatgaaaatggtaaggaagttaactcgggcagaatgaacttgggtgttgtaactgttaacttgccaagaattgccatggagagtcatggcgataagaagttattctgggaaatcttcaatactagaatgcggacttgccaccaagctttagcctttaagggtagacgtgcaattcaagctaagcccgaaaatgcgccaattatgtatcaatatggcgtctttggtaaacgacttaagccaggtgatgatgttaacgagcttttcaaaaatggtcgagctacgatttcgttaggctacatcggtttgtacgaagtagggacagtcttttatggccctgattgggaacacaatgaagaagcacatgattttacaattgagatcgtgaagaaaatgcatgacttgtgtgctaagtgggaaaaagaggacccatatcattggcattacagtttgtactcaactcctagtgaaagtctaactgatcgcttctgccggctcgatacggcaaagtttggcaaggtgaaggacatcactgataaggaatactacactaattcgttccactatgatgttcgtaagcacccaaccccatttgaaaagttgacttttgaagcaccatatccatattatgctgcaggtggttttatccattattgtgagtaccctaacttgaagcaaaatccagcagcccttgaggcagtttgggattgggcttatgacaaggtaggctatctaggaactaatacgccaattgataaatgttataagtgcggttttgctggtgaattcaagtctactgccaagggttttgaatgtcctaagtgtggtaatcatgatcctgctacttgtgattgtgtcaagcgaacttgtggctacttgggcaacccattgaagcggccaatggttcacggtcgtcatgaagaaatcgtgcaccgggttaagcatatggactttggcatggaagatagtttagctaccgaagaagaagtaaaaaacggtgagtactaatgcctgaaaaagataaaaacactcaagaaggaccagatatccggagtaatttgatcaaggttaatatgggtggggataccatgtttgtggatcctgaccaatataagccacagttagatcaccaacgtgagttaaaaagaatgcaccgcaagccgaaaaatccaaaaccacaagagtggaagactgaggattattctaaacataaaattgcggattataagccatttaactttgttgatggtgaaggcgttagatgtagtctttatgtttcaggctgtttgttcgattgccctggttgctataatttagcagcccaaaactttaattatggttttccatatacgcaagaattggaagaccgcattattaaagacttgggccagccatacgtgcagggattaaccttactaggtggagagccattcttgaatacttgggtttgtttaagaattattaaccgaattcgaaaagaatttggccacagtaaggacatctggtcctggtctggatatacttgggatgaattgcaaaaagaaacacctgataaaaaggaaatgttgtctaagatagatattctagttgatggccgctttatgaatgatttaaaggatttaaccctgcaattcagaggttctagtaaccaacgaattattgatgtgccaaagtcgatgaaggcaggcaaggttgtcatctgggataaattgcaaaaataagataaactaaagtccggaatgattttctggacttttttgctaggtgaaaaaatggaagaaaaaaatattaaacaagttgatcaaatcatgacggccttgacccaagtgattgatccagaattacaagttgatgtagtaaatcttggtctgatttatggcatcgatatcgaaggagataaggcaaccattaagatgactttgacaattatgggttgccctttatctgattatttggaacgacatattcaaaaagctgttctttcagttgctggaattaagtcttgtgacattaagttggtctggtatcccgtctggacgacagagcgtctttctagtgcagctaaaaagcaattaggtgtaactaaccatgatgatcaaattaagcaggagaaagccaccaaagagaagattatcgacttttcagtaccgatcaagaaaatggcagatgaataccctgactttgttcaaattatgtacgattgtggttttactagaattaaaattcctggattgcttaaaacggtggggcgtgtgatgaccattccattgggagcccaggcaatgaaacttgatttggctaaagtgaaaaaagcatttgaagataaaggatacaaggtaatcaatgactgataaaaaaagacaggatgcaatcctgaaaattttgcattatattcaaaacggcggcgattttgcgaccgcgaagaagatgtttcaagaagaattcgatcaggttgatgtggccgaaatcacagcggcagagcgcgaattaatcaagcaggggttaaacccagcagagattcaatacctgtgtaatgtgcatgccgatgtctttaagggtaatatcaaggagaatgcggtaaatcctgattttgctactccggggcacccggtgcatacgattaagctggaaaatatggtactgaaatcattggttaatgacgcactcttgccagatttgaaaaagtatcaagcaggtcaagatacactggataaaatcagaaaagaattgagtgatttggcaacaatcgataagcattaccgacgtaaggagacctcgctttttccattaatgaataaatatggcattacagctccgcccgaagtgatgtggggcgttgatgatgatattcgcgatttaattggggatgcaagcaagattgctggtgaggagcatccagataaagatcagttggctgaggcaattaaaaaggcgagtcatgaagtgcttgagatgatctttaaagaggagagcattatgattccgatgattgacgaggtagctgatcaagatgattggtacaacgttaaacgcgaagagagtcagattggctataccctgattcgcaagccaatgaattggaagccaaaggaagctaaaaaagaagcagggcctatttctgttagcaatctttcatccttcctcattaattttgaagaaggaaggttaaatttagagcagttaaatgcaattttggatatgttgccatttgcattgacctttattgatgaacacgataaggtagcttattttggcggcggtgctgagatttatccgcactcgcgcaatgctattggcaatgacgtattctcgtgtcatactgctaaaagtagaccgttaattaaaaagatttttgcgcaatttcattcaggtgaagttgacaagtatgagtttcactttactccacacaagatgaagcgctgcttatacctacgctattatgcagtacgtgataaaaatggaaagtatctgggttgtcttgaggtagcacaagatgtgacagaaattagaagctggactgaagaaaagaaaaaaatttaacttgttgggctgtgttctagtaagggatgcagctttttcttttgccctcgtgcaaaaaatcacaattcttgctagactagattgagagaatgattaaaaagaagggaagagagaaaatgcgcacagcacatggaaaacaaccagctgatgaaatcaaattgcattggcttcttctaggccaattactaacgtggttgggttccagctttatttggccattgacttcagtttacctgcacgaccatcttggcgtttcactagctttagtgggtgtcgttttactgttcaactgtgttgcaaatatgattgggtcatttatttcaggctggtgctatgaccatatggatccatatgtcttgctgattgtgggggctgctttagatgcggctgtcttgtttggcatggctttgaatcatagttggccgttatattggctctggatgactttaactggctttttgggtggctggaatggagcattgattaactcgattgctactagtattaaatctaagccaggtcgttatgtcttcaatatgatctactttgctcaaaatgttggggtcgtttgtgggacattagcagtaggttatctttatgattattcagtgactttattatttgtcattgctggtcttttattcgttggcgtttgcgttaacgcaattattaattatcggccaatgattcagttccacaaggagcgtttggctaacaaaggcgaatcaaagaagaaggcctttgagccgatgccaaaatacaatctgattatgtcaattggcttttttgttacgatcgctgtaatttggttgatgtacatgaactgggaatcaaacttgtctgtctacatggtttctttgggcattccttttcatctgtatagtttgttatggaccatcaatgccggaattattgtcatcgtgcaagctatcttaagtcgttttactatctttaagagcttatttagacaaattttatttggcactttgatgtttgcaatttcttttgttactttgatttttgccaaagattttgcacatttcgccttatccatggttatcttaactttaggcgaagcaaccgcaatgccgtcgattccaacttatgtcaatgatctgtcgcccgattctagtaagggcaagtatcaaggcttaaccttgtctgcatcgtcaattggtcgagctctaggtccattatttggtggtttaatcattgaagatttcggctatattcaattctttgctgttgctgcaattggtatctttttgcttttagtcatgcttattccaatgcatgcgaaactacagaaaaaactaaaattatttgtaaaataaaaacaacctgaattgtcaaattaagtgcaacagttaggttatgaagagatatattgcttgaagagttcctctgctgtgtgatattggaggattcggcgatatttgtggttaatggcatcagttgcctgttgaacataagcttttgacttgtctttcatgctcttgcccttagggaagaattgacgcaaaagaccattgcagttctcattggtgcccctttcccatggagaatatgggtgagcaaagtaaatctggcagcccttgatcttggtcatatccgcaaactcagagccattgtcaaacgtgattgatttaaaccaggcaggatgtctgtcaatctccttttgaagcagcctttggcatgtgcttgcccgatagtcaggaatcttgataactacttcaaagcgtgtggttctttcagtcaaagtcattaaagcaggctgattcttgcgtctgacgcctttaaccagatctccttcccagtgcagcggagcttttctgtcttcaacctccttaggacgctgttcaatggaattgccaagatgcttcttgtgcaaagcgtgaccgccatggctgtgatgacgcttgttcctgcgtcttttgagcttcataggcagatcaatattgcttatgtccagcaagccctgatcaatatagcgatagacggttggtgtgctgggacaagggtagcctggcatagtccttttgaattcaccaacgaactcatcgatgctggtggcatcaaatttagctttaaagcgtctggagagcattctcaaaaagacagcataatgcttcaatggattgcgctgatagcagtttttgcgacgcttctcataataaatctgtgcagtatcagcgtaatagtgctcatacaataaatagctgctgtctctttgcaggacgcttccgcgtttgatttcgcgactgattgtcgacttatggcagccaacttcttgagcgataacagtacgggaagttatgccggaatccagcattgcttgaatttgtccacgttgtacgctggttaattgatgatagtgcttagaaatgctagaatttgaattggtcatgaagatcttcctttcttgatttttcgtcacttcaagtttaggtcttcatggcctttttgtttaacacttagtgttgcacttcaattttaaatccgggaaaataaaaacaacatgatagcgttaatttttttataatgctatcatgtctttatatgaaaaatttttccactagggaggtaatttaatgtattttaacgtacgcggcggtgctggtgacattactaaggctaatacttcagcgcgtctacaagataatttatatttggccgttaactcagaatggttggaaaaggctaaaattccatctgatcgttcaagaaccagttcatttgatgggatcgatcttaatattgaaaagaacttgatgcaagactttgcagattttgctgctggtaagaaggaactgcctactgtgcctaacttcaagaaggcagttgagctttacaaggttgctaaaaactttgacaagcgaaatgcggatggtgccgcacctattcaggcagatttgcacgaaattttagacttgcgcaacttcgctgactttaacttgaaggcagcagatttttacaagaatggttttgccgttccatttgctttcagtgttgaagcagatatgaagaatactaagattcactcattgaattttggtggtccaagtactttcttgccagatacgactacttacaagactccagctgctgagaagttattggatgttttgaaaaagcaatctattaagttgttaacaatggccggacttgatgaaaaggacgcagaagattacgctgacttggcaattaagtatgacgctaagattgctaaggttgttaagtcaactgaagaatgggcagattacccagcaacttataatccagtttcattgactgactttgaagcaaaattcgattccttcaagatggattacttcttgggcggattatttaccaagaagccagaacggataatttcaactgaaccacgttacttagatcacgcggaagaattgttgaatgaagaaaactttgctgaaattaaggcttggatgctggttaagtttattaatggcgtagcttacagcttgtcacaagatttccgtgaagctgcctttccatttagtcaagctttgtcaggccaacctgagctttcaagtggcgttaagcaggcatatcatattactaatggtgacttcggcgaagtagtaggtgtctactatggtcaaacttactttggcgcagaagctaaagcagacgtgactgatatgattcacaagatgcttgatgtttatgaaaagagaattcgtgaaaattcatggctttctcaagcaactaaggataaggcaatcgttaagttgcgcgctttgatcttgaagatcggttatccagacaagattgaagaaatctatgaccgtttacaagttgatccaactgctagcctttatgaaaatgaagtgcaatttggtcgggaacaaattaagtacaatcttgagaaattgtaccaagatgttgaccgtacggtatggttgatgccaggtgatatggttaatgcatgttacgacccacaaagaaatgatttaactttcccagctgcaattttgcaaaaaccattctatgacttgaaacaaagtcgtgctactaattatggtggaatcggcgttgttattgcacacgaagtatcacatgcctttgacaataacggtgctcaattcgatgagtttggtaacatgaagaattggtggactgatgaagattttgctgaattcaagaagagaacgcaagctgaaatcgacttgtttgatggtattgaatatggccctgtaaccttgaacggtaagcaaatcgtatcagaaaacattgccgatcaaggtggtttgactgctgctgttgaagctaacaagggtgaaggtggcgacaagaaggcaatgcaagaattgtttgaaaactttgctcgtgtttgaacaactaagcaattgccagaatcaattaagacgcaagtatctatcgacgttcacgcaccaggtccagaacgtgctaacgtgcaatcacaatgccaagaagaattctataaggcatttgatgtgaccgaaaacgatggcatgtggcttgctcctgaaaagagagtagtaatttggtaagtaacttttcttaatatcgagtatgaaaaattagctaaattacatataagctcctataacaagaatgactacagtgctgctactacactgcagccctttataacttattacccattaataaattttttgcactaaaaaaggctccctgttgggagtcttttttagtttagtaattatttagttttagctgtcgagtaatcctttggcttaatccgcttaatgtaagatggatttggtcgacccaggattaatggtacacgctcgattacggtatcggcgtattctaagccgaaccaggaagctgggttagaagacaagttttgcaagcgaacccgcgcttccacaagccatttttcatagccaaccaattgtgtttgtggactgatgacgtcgttaacaataacgaatgagaagtcacctacgtcacgacctgggctggtggtgtattcctgtggttgtggctcaatcgtaccgtcggcgatcaagtcatgaacgatctgacgaatgtagacattcacactagtttgcttcttaaagccgaggtagagctgaatgttaattacgttcttcgtaccgtaagtgttaacagcatattcagcggtaaatggctcgttagtaacattgacagtgacaaaccagtaagcctttgctcgtttaggtcttttatccaaaattgagtacaggatttcacgtttgatgaacttattgtacttaacgttggccatgtaaaccaagttggtagcataagttgggtaattttcatcgtgacttaagttcgttaacatgtcggtatattcatctaagcgaacgtaagcattgcgagcttcacgcttgtcacgaaccttgttgccgtaataccaaacatacattatgaagccgatagcaccagcgatgaagagtgaaacgtaaccaccatgagtaaatttagtcaaacttgaaatcataaacatgatgtcaaggacaccgaagaagatcaagaagatccagttccaaacagtgttgactttcttcattactaaccattcataaagcaggatggtagtcattaacattgaaattgtaatggacagaccataagctgcttccatgtgagctgaagtttggaaatataagacgattgcgatagtagcaacacagatacccttgttaatggaaggaatataaatttgtcctttttcgttagatgggtagttgatgttcattcttggcaagaacttcaagcctgaagcttctgcaactaaagtgaatgaaccggtaattagggcctgagaagcaataacagcagcaatagtagccaaaatgatggcaaacaatctgatgttagctgggatcatttcaaagaatggattgagcacaccgccgtctgcaggacggtaagttgggttgttcaaaatccaaacgccttgaccaaagtagttgagtgacaagcaaacaaaaacaaatggccaagaaccaataatattgcttttaccaacgtgaccaacgtctgaatataaggcttcggcaccagtcgtagctaggaaaattgaccctaaaataaaaattccagccttattatatggactgactaataatctaatagcgtaaattggattgattgcttgcaagattgaccagtcaccgaccatgttcattacgcccattacacccaaaaaagtgaaccaaaggaacatgattgggccgaaggctttaccaatgatactagttcccattttttggatagaaaacagaactagcagaatgactacagtgatggcaataaccatgttttgagtagaaacgggtacattgccgccaaagttcagtcctttcagtccttcaatcgcagttgtaactgtaactgctggagttaaagtaccatcggccaaaatagcggctccaccaattagcgctggtagaactaaccatttagctcgttttctaaccaatgtgtataaggcaaaaatcccaccttctccgtggttagttgccttgagggcaataattacggtttgtaaggtagttagtagcgttacagtccaaagaaccaatgaaattgatccaatgataaagtcacgatttacattaccaatgccgccgttgccttcgacaattgatttcataacataaagcggactagtaccgatatcgccgtaaacaataccgatggcgattagtaagccggccgcgctcatgcgtttagctttattattcattatctcgttatctcccacaacaaaattgtagttttaataaaaaaagaaaatgccacgatgacattttcccttattgtacctattttcgtctatttcgctggacaatgcaagtgagatttgtcagaaattgaatctagaatttggtgatgataaagttaatgcattataataaaaaatatgcagtaaaaaagctcccatacagggagcctttttgatataaattatgaaagtgatgaaggaatcttagtacgttggtcttcgtcccatttttcccatgcttcataagtaagcatttcttctggcttaacaccagtcttttcttccatggccttaagcaagtccttaaagttgtagtcgtggtattgtaacacatgatcaaccaacttcttgcgtgggaagtggatgttgtttaaaacatagcgattgatatcaaccatgttatgattttcatcgtaaaggttgataacttcaagatcgtcttcatcgaattcagcgatgtagaagttagcgaagacctttaagtaatcaggttgttctttgaattcttcctgtggcatagtagtcttgttagcttctggcattacgactttaaagtcgtcgttttcttcattttctttatcagcttgagcttgagcgttcttttcttcttcagtcaaagttgttacccctttatttataaataaatagatacaaagtcaataataattttacagacttctacaaataaaagcaaatagaagtggttgagagatgcaaaagtatagaagtcagttttgattagtaaaatggagtaaaatgaagtaaaatataaatgtaaaaagtaaaatgaagtaaaatgaggaaaaatatgtataatgaaaatccttttgatgctgaatttggcgggatcccagagctatatcttgattttaatgatgatgcagttaaatttgctcaaagagcccatcgtctcaagaaacatccaacttattctctctttattacaggggtacgaggttcaggaaaaacagtttttatgaacaaagtgggtaaagaactaaaaaaatataaagatactatggtagtcactttgcacaattctgatgatctttttcgaatgatgtatatcaagctagtgcctatgctagataaaatcaaaaaatggacgccatcaatttctattaaagttccttttgtatcagtagatttcactgaagcaaatgaaaagcatgatgaaatatattataaagtagaaattaacaagattcttaaagctttgaacaaagtggggattcgtgttgcattttgtattgatgaagtgtcaaatacacccacaattcaaaaattggctgaggaattcaacgactggagcctaaataactatcaagtttcagtgattatgaccggactattaagtgaagtggcggaactatcaggcacacataatttaaccttcttggttcgggcggatagatttcacgtctctaaactatttgcgtcgtcaattgccagaacttacatggatgtattagacataacagctaagcaagcagaaattttggcagatatgtcaaaaggctatgcttatgcatttcaattgatcggagatttgatgtatgaaaatttaagtcaaaagatgacgtttgaaaaagctttggaatatactaaacttagattccgtgatgtacttttcaaccaagcgtatgatgtaattgctcatgaattaacggatgtggattttcaatttttgtacgctatggcgcaagataatagtattagttcaattattaggactatgcaaaaaagtaagcagtatgttaatagctatcgtgcaaaattaattaaatatgatctaattaagccaataattaggggaaaggtcggctttaccttacctttgtttagagatttcattcaagcaaagtatgatgagcttaactggggctagaatttattgaaaaaattcggcagaaaatcacagaaatgaacgcagatccagtttggagggatactattatggactatgagactaagctagctgaagagcgtgaatacggtgaagaaaaaggaattttaagtgcaattaagaaaattatttatcgtaaccggagctatggtgtatcagattccaaaactttggaggatctgacagaagactaccatgattctgtttcccgggatcaaattgaacaaatgatgaaagaagcctaggtctaatgaaaatagccgctgctcaatgtgagtaacggctatttttttacttgttatcatcagcagcagagctggaacttacggcagatgattgatcgttgcttgaggaagccgcgctggattggttgatggatgataatttaagtaattattcttttgaaaaaatatttcttacttgttggagtaaattatcgaattctgttgattcttttatgtggccgattatttttccatgacgggcaatgaaatcatacgatagcatttgaaataataatgcatctccatttgtgtgactagcataatctagcacatagaatctaaatggatcatctgtaatatggttatgagtaattgctagtcctattactaatccagactttttagtgtaagcatgtctgctcactactaaatagcgtctacgaatatttcctttttcagaatcatgtccacccatttcgtgaccagcatgtggttcagcatcgatcattattatgtcaccttgatggacatcaatccttctcatttgctagttcctttccgacaggtttgacttctctaggattgtatcctaattcttggtattctcgctttatttcagtatcataatcataatcgtcataagcggggtctgaccataaatcataattgtttttagcaattcttttgtatacaatatcaccgtttttatttacatcaacagagaattctgtattaagtggaactttgatagtacttggaatggtaagcactattgaatttccttgttttctagccttgactaccataataagccctcctcgtattatataaattgtaattagtcatattgtgataattaatcaaattagtatttgctttttgatcttcacatgttagcctctaattgtcattggctttggtcaactggtctaggttatcacctcctgcagttttgtctgctttataagtctgccacccagacagttcctttatgctctaactcacatgctgtattgattgcttctttttgctagtccttgagcaattgggattaggtgcagctttcaaagaagcaaccagtgaatacttatactggcgagattgaacttaagaactgtaattaggggttaacatgtgaagatcaaaatctatgatcagaaatttgaaagaaaggaggccatttccaatgaaattatttgtcggtattgatgttagttctaaagatttacaggtcgttgcacttgattcagaagatcaaaacaaacgcttaattaacgatagctttgtcaatgatctttatggtgctagtgaactgaaaaaacaaattttagatctagctcaaaataaacactatgatcaaatcattattggcatggaagctacatctatttacagttttcatcctgcttactttttccaaaatgacgaagatttacaaaagctcaatgtagagactgatgtaattaacccccaagaaaccagcaggtttcataaagtctttgaagaaagtaaaactgatcctctcgatgcttattacattgctttgtatctaagctttggacattatcgagtaagcattgccagacaagacaactatcttgctttagagcgtttaacgcgtaccagatatgaattagttcaagaactgactcgtaccaaacagcacttcattgaagctttatattatcgggttaataaactaatcactgtcgataaagataagattaatactcctcttttcggtgctacaatgatgtctattgtaaccgatagtaaaactctggatgagatcgcggatatgcctaccgaagacttaatttcttacttacaggttaaaggcagaggacgcttttccgatccagataccttggctaaagcaattaagaaagctgttagaggttcatatcgcttaggcaaagtaatgactgattcaattgatgcagtgctttctgttcattacaacatgattcaaagctttaatgaatctattaaagatctagaaaaagcaattgatcgtatcgttgatgcattaccagaaagcaaaattctggaatcaattcccggtattggcaaaacctatacagctggtattatcgctgagatcggaagtatcgatcgctttgataaagaagaacagctggctaagtatgccggcctaacctggaatcaatatcaatcgggagatcacagcaacgaacatactccaatggccaggactggaaacagatatctaagatattacttgattgaagctgccaatctagcaagattacatgatcctgttttcaaaaaatattaccaaaagaagtatgatgaagctgtctactcgccgcataaacgtgcttgcacattaactgcaagaaaattagtacgagttatctttaaattgctcaaagatgacaaactgtacaggacaccgaggtcttaatttcaaaaattggtctaaatttaaaagtaaacaaaagtttaacattaaaaaaatcaacctttaccaaggcttagtttcatatactcaaatttatgatcaaaaagaacaaatatcatcgcctttcatttgacttattaccacatgacttattaatcacaatttaagtttaccgtaaaggaacaaaatctaaaaatgaaaattattattgcacctgcaaaaattatgaaaattgatcgtgattcatttccaattcagtcaaaaccgcagttcttggataagacacgaattctagaaagatttcttaagtcaaggtcaaatgaacagttaaaagacctttggcatgctagtgaaaatgtgactaagcaaagcatattgcaactagaaaatatgaatttggatgaacgattaacccctgcaattttggctttttcaggaattcaataccaatatatggctccggatttatttacacaacctgcacttgactatattcaaaagaatttgcggattctatcaggattttatggtatgctccggccttttgatggtgtttgcccatatcgcctagaattaaatactaaaatggttggttttcgtgattatagcttgtattatttctggggcagtgatatcgctgaaaatttatttcaagaagataatatagttatcgatttggcttccaagcaatatacacgtttggttaaaccttatttgagtcaaggacgacaattaattacggttgactttcaggaactaaaaaatggtaagtggaagaccgttggggttcacgctaagatggctcgtggtgaaatggtgcgctacattgccgagaagcaaataaaaaatcccacagatttgcaggactttaatgattttgaatttcaatttgaacctgacgtaagtactaaggatcattacgtctttcgtactgagttcgactttactcggcgctaaaataatggttttaaaaattgagcagttaaatctgatgctgactttttgtattgaccagtgaatctgtgatctacatccgtaatggcatgaagttcgctattttcataaatatcatggtattttttagcatatttagggttaactacttggtcattagtaccataaatgactgatactgggccactaaagcgggcagagacctcgtaaatcggtaaaacttgagcggttcggagataaaatccgcctagtttcattcctaatttattgccgactagtggaacagtatcaggaatatggttaggatcatagactgcgccttgtgtgttacctttaagtgcatcgtcttttaattgagcagctggtgctaaaaggacaacttttttaatcacatcaggataaagaccggcaagcattgatgcaattacaccgccttgggaatgaccaactaagaaaatattacgtacatgtggatcggtgcgaacgtattctaagattgccttgccgtcagcgatttcgtttggcacagtcatatcttcaaacttgccgtcactttcgccatgaccattaaagtcaaaacggacgctagcgacattttcgtcgcgtagatcatcggcaatttgtcttaataattcagtgttgcggttagcggtaaaaccatgcatgaggatagccatgtcatagatttcgccgaatggttcttcgcggtctcctactaaggtgagaccatctctttcaattgtaacgcgggacataatgtttcccctttctaattatctatttatattttaagctttttaaatttcaaaacgctaaaaaaacagtaaagaaatggaaagattagttaaataagggtatgattttaagaaaaggtgatgtaaaaaatggaaatagtttttattcgtcatggacaaacagacgtgaataaagataatcgaattcagggcgcacaagttgacgcagacttgaatgaatttggtcgtgaatatgctaaaaaatccgccgctaagtttgatgaaaataaatttgatgttgtttattccagtccaatgaagagagcagtagagactgcgaaaatttttactaaaggtaaaaagaaattaaatttagacaaacgtttgctggaatttgattttggtgattgggacggcaagaagatggatgatattgctaaggaatatccggatgtcgttgatccatggggaaaagttactcgcgactatgttaaatatgccaaaaatggtgagggctacggagagtttgaagcacgttgcgctaactttttagacgaaatatatcaaaaatatccagaaggtaaggtattagtagtggcacatggtcgtttgattcgaatgatggcagctcattatttgagtaatggcgacatggacaagatagatacgccaaataattgtgcattaagcaaatttagcgtccgtgatggtgttgctaggttgtactactataatcgagttttagtttagagaaggaaggcagaggccttctttttttgtgtatatgtattgacaactcgtcaaaatcagctatgatataagtaattgatgacaagtcgtcatttgtgttggaaaaggggaaaacaaaatggttaagcaaacttttaaaaatttaccgtctgctaaacgtagacgtattgaagcggtgttgttagaagaattcagcacttatccgttagcagatgctaaggtgtcacatattgttaagaatgccaacattgctcgaggagcattttataaatattttgatgatttaattgatgcatatgtttatatgtatcacatcgctattgaagacattcatgctgggatgagtcctaatgaaaaatttgatcctaatcatttttatgcaagagtagttaagtttattgataaagttcaatacagtaaatatgaaccaatgatgaaattgcatatgtcgcaaaatgagtacttgataccacataatttcaaaatttattcaagacaattgttgaatatggggccacaattgtggagtgccatggtacttagtcatgaagttatcaacttatgcttatcagatcccgaaaatcaggaaaagaacttggcgcgctataagaagagcctggacatactagcaaaggggatgtagttatgtttctagcactgaaagaaattaagcatgaaaaattgcgctatggcttgattattttgatgatctttttgatcagctacttaatttttatgttgtcatctttggctgttgggttagcaagtcagaatacacaagcaattgaaaattggaatgcgcaaaagattgttttaaataaaaatgccaatatcagcatgagtcagtcaattctgacaaaagacgatttaaaaaacgcaaaaattggcaagaatgaagcaattattggtcaattaggaattgtagttaagaaaaagggaaaaaactcaatttcagctcaattcttaggcatcaaaaaagaccagtttatttatcaagatcaagatataattgctgggaaaaaagcaaagaatggtaatcagattacagtagacagtagtttcaaagacaaaggctacaagcttggagatcaaatttctctgaatggctctaagaaaaaatataaaattgttggttttgtaaataacgccaagattaatattgcgccaattgtttatggctcaatgaaaacttggaaaaaactgcggatggtcgctcctaatgtagccgcttctgcagttgtttcaaagaatagcaattataaattcaattataaggatgccaagacatacccaattcaagcctttattaataagcttccaggatatacggctcaaaacttaacttttgaattgatgattggattcttatttgttatttctttgatcgtgattgctgttttcctatatattttaactatgcaaaaaatgcataattttgccgttatgcgggctcaaggaattccaagtaaaactttagttggtgcaacgatcagtcaatccataattttagtagctattggtgttgtaattgcgattatcttgatgtggttaactgatttaactttaccagcagctgtgccaatgacttttacgccagcaattatgattagtggtacgttagggatgctagtcatgggtattattggtagtttgattccgattagatcaattttgaaggttgatccagcaaaggcaattggtgagtaaaatggcagtaattgaattaaaagatgttaataaagtttatggtaaaggcgaagctaaagttgcagctttgaaagatatcaattttcaggctaataagggtgaagtggttttaattatggggccttcaggcgccggtaaaagtacatttttgacgatcgccgggtccttgcaaaaaccaacttcaggtgaaattttgattaatggtcgagacattagtaatttttctgctaagcaaagtggagaactacgcttgaataaaattggctttgttttacaagcttataatttagttccatttttgacagttaaagagcaatttactttgattgataaagtaaaaaagcaaaataatttgtcgcaagataaattgcaaggcttactcaagcagctagggattgaaaagctggttaataagtatccaaatgaattatctggtgggcaacagcagcgagtagcaatcgcgacggccttatatgctaacccagatattttgttagccgatgagccgactgcttcgctagatacgcaaaatgtggaagaagtaggacaattgtttaaagatttagcgaaaaagcgtgacaaggccgttattctagtaacgcatgatccgcggctagaaaaatacgccgaccatatttatgaaatgatggacggcttaatgactaagaaaaaatagtaagaaaaaatgcctcattgaggcatttttgtttataagttaggatccatttggaaacgcaacggtgagtcaccagtttgttcggtgattagtttagcgatcaattctttataagcatcagtagcagttttagctaatttggcattggcttcatccactaatttaatttgttgttcttgatccttttcttgtgctaatttttgatcatattgctgtctaatttgaagcaatttttcgttagtagtactttgcgtattgcttaaagcggtgccgtacttaccccaattacgatcaaccaggacgctagccagtttaaagacccagtaagctgaatttggtgagtaggtttcttttccatttttccaggtatttggtaccttagtgccttgaggatagaatggcacataaacactttgcgcagccacacccatagctagccagtgaatcatgttttcaccgtttaactcaagcaagtgtgattcctgagtagtagccacagagataggtctgaaagtggcattatttctgtttttctgattggttaaatcataggcggtgttgttgtagtgatcgcttaaaacgcgttgagcgtcttgcgcagaaattggtgcatcaggcttgcgaataaatggcaggttaaagctttcgggttcttgtgctacagatggagtaagcagacgttgaccgctccatactcgtggtgtgttgtagtgtaagtcactatcgtcatgagtgccaaaaatatcacgccaaatgaatggctgatttttaggccagagtttattgtcgtagacaaatttttgcaggtcttgagaatacatgaagtcgtcactggcaaaatcaatttcttgaatagctagttgattggcgacaatagcgtaggaatcatctgggattcgttgtgcaacccaatgatggccagaaccgatttccatgtaccaggcttcatcacgatcgccaaagagaattccgtcagcttctgctgcaccatatttttctacaatttctcctaagcgctgaacgccttcacgtgcggatttaacataaggtaaaactacggtgaccattgcttcttctaagattcctttgtcagtatcaaaggggtcaacagctaaaactcggtcatttgcgtaggcactttcggtggcgctcattgctacatgatattcattaattccgtcttcttcgaacactccgtacttatctgtccattctggggttgaagaataagagtagctagctgttggtaaatccatttcaaacttattgtctttggatttaaaatggtttttctgtacattatctcgatgtggattaaaggctaaatgcttaggccaagcagtcttagcatcttcattacgaccgatgatgatactgccagaaagagaggcctttttcccgattaaaattgaggtgcatgatgagcgccaagttgaaactttcattgataaaaacacgctttctaattcttttgattttgtaatataattataatagaaatttttaaatttttaattttcctgaattgtcaaattaagtgcaacagttaggttatgaagagatatattgcttgaagagttcctctgctgtgtgatattggaggattcggcgatatttgtggttaatggcatcagttgcctgttgaacataagcttttgacttgtctttcatgctcttgcccttagggaagaattgacgcaaaagaccattgcagttctcattggtgcccctttcccatggagaatatgggtgagcaaagtaaatctggcagcccttgatcttggtcatatccgcaaactcagagccattgtcaaacgtgattgatttaaaccaggcaggatgtctgtcaatctccttttgaagcagcctttggcatgtgcttgcccgatagtcaggaatcttgataactacttcaaagcgtgtggttctttcagtcaaagtcattaaagcaggctgattcttgcgtctgacgcctttaaccagatctccttcccagtgcagcggagcttttctgtcttcaacctccttaggacgctgttcaatggaattgccaagatgcttcttgtgcaaagcgtgaccgccatggctgtgatgacgcttgttcctgcgtcttttgagcttcataggcagatcaatattgcttatgtccagcaagccctgatcaatatagcgatagacggttggtgtgctgggacaagggtagcctggcatagtccttttgaattcaccaacgaactcatcgatgctggtggcatcaaatttagctttaaagcgtctggagagcattctcaaaaagacagcataatgcttcaatggattgcgctgatagcagtttttgcgacgcttctcataataaatctgtgcagtatcagcgtaatagtgctcatacaataaatagctgctgtctctttgcaggacgcttccgcatttgatttcgcgactgattgtcgacttatggcagccaacttcttgagcgataacagtacgggaagttatgccggaatccagcattgcttgaatttgtccacgttgtacgctggttaattgatgatagtgcttagaaatgctagaatttgaattggtcatgaagatcttcctttcttgatttttcgtcacttcaagtttaggtcttcatggcctttttgtttaacacttagtgttgcacttcaattttaaatccgggaatttttaattttatttgttttagaacaaaaaagaggttgcaatagaatgagtagtaaaccagaaaataaatcgattgaattgacaacggattatgcaaatcattcgattaatatgaagttctcagataacctgacagatgatcgtgaacgcggctatattttatctgctgcattcttttcgttttgtgctgcacaaggattggacaagcaagcagttattgaaatggcttcttcacattatgatcaatttacaggagacaacggctcatcgctatttaagcgatgataatattttttaataagttagtgtataagacttgcaattgttatttttttggatatattatagtgatgaagaaaagaaaacaagtgtattgaaaagcacatgttttatacaatgattgaggtgcattaaaatggcaagaaaaaaagaaattagtaaagacaaaattttagatacagcctacaagatggcaatcaaggatggtattgaaggtttgactgctcgtagcattgctaaagcaggacacttctcaacccaacctttgtatctagaatttaacaacatggatgatcttcgcaatcaagttttgagaagaatctctaatgacttgagaactcatactttacaacaaaagtacgttggtgaacctttaattgacttggatttgtcatacattgattttgctcaagctcatgttaacttgtttagagcaatgttcgttgatggcaagtttggtagcaagatcattgctgacactttgatggaacttggaactgaaaagttcaaggaacaatatcctgatgttgattatgatgatcaaaagattcatgacatcgtaattgctaactggatttctactacaggtatggctgcattgattgttaatgagattgcaagcttcagccaaactcaaatcgtcaatgtgttgaatgctcaaatccacgatgctatgcttaacaatcgtctcagcgaaactcaagaaaacccaatgtttgctgccgacgaagaagcttcgcttaaggataacttggcatagaaatttcaccaatcatttgtgcttttcattcagtagagggcgccttcattatcgaaggcgttttttcttgttgttattaaaattaaaatgacataaattaaactacattagtctataatgataattaagaggatttttgaaaggtggtttttatgaaggtattagctttatcgggctccaatgccgataactcatttaacgaaaaattacttaaagtcattattaaggacttaggcgataagtatgattttgactttgcgactgttaagggcttgcctatgtataaagaaggcgttgatgctcctgctagcgtattagctttaggtaaaaaaattgctgatgcagatatggttttgatcgcttcaccagaacagcaacactcggtttcaagtgccttaaagagtgcacttgaatggctttctagttctgttcacccattccatgataagccagtagttattgtgtcaacttcaccaatgcctcaaggtgcgtctcgttcgcaaactcgcttgaagagcattttgggcgcacctggttttagtgctcatgtctttgctggtgacgaatttatgatgggtttggcaccaaaacaatttgatgataaaggcgacttgaccgatgcaggtacacttaagtttttgaatcacttctttgatgaagttgatgattggtatgcacaacttactaagtagggggcttatttaaatgaaaattttagcaattgttggtacaaacgctccattttctttcaatcgttttttagcaaaatttattgctaagcgttatggtgagcaagctgatattgaagttaaagaaatcgatcaacttaagcctttctgtagaactgatgagccagatgatgttactaagaagtggatcgaggatgttaagaatgcggatggtgtaattttggctacaccagaatatgatcactcaattccagctgccttaaagagtgcgcttgaatggttaggttcacatgctggtcctaatgtgatgaagatgaagccggctgcagttgttggtacttcatacggtattcaaggatctagtcgtgcgcaagaagatgctcgtgaaatcttgctttcaccagacatgagtgccaatgttttgccaggcaatgaaatcttaattggcggtgctgcaagcaattttgataaagaaactggcgatttgaccaatgaagattatattaagcaactagatgctatgatggctaactttattaaatttgttgaacaagctaacaaataattttgcgtgacttaccacgtgatagtaaaattaccggatagggacactatccggcttttttatcaaaatacttaataaagagatgaaattaatgaaaccaaatattttgccattagaaaaagtttgtaatccgcgtgatttaggcggatatgttggctatcagggacgtaaggtcaagatgcatcggttattaagaacgggcaagattagcaacataacgagacatgatcaagagtttttgctcaattatggcttgactaagattattgatttgcgttcaccaactgaatgtgaccattgtccagacagcaaaatccctggcgtagagcatttctgtattccaatttctgttgatgacaacaccaaaggcggtaagaaagacttaacccaagtattcgcaacttatcgtcaagatcagtatgctggctttagaatgatgtgtgagcgttacaagtcacatgtattgaaagaacacgctcaacatagcttgcataaaattttagagctgttggccaatactgaaaaaggtgctgtactttatcattgttcagaaggaaaagacagaactggattggtaactgtagtcttgttatatctgcttggcgtagatatggaaacaattagacaggactatttgtactcaaattatatgcttaataactatcgggccaaaagagataaaaaaatgcaagaagagggcgagaatctttgttttcgcgctaatatgcgaattttaggttcagtttctgatgcttttttggatacttcattaatcgctattgagcagaattttggtagtttcgataactttttacaagaaaaaattggcgtaacgacagaactacgtgaggcgttgcgtgatttatatttggaagagaaataattatgattaaagatttagcattagagcaggtggttggtgatcatcatgctttaggaacttcaattacattgcagatttttggtactcaaaatcgtgatctattgcaaaaatcatttgatttaattgatcattacgaagatatttttaccgttaatcgagatgaatctgaagtaatggatatcaatcatgctgctggagaacatccggtacaggtctctagtgctgtgtatggtttggttaaattggcagtagaaaagagccgtgagaattttggctttaatgctctgattggaccagttgttaagctttggcatatcggttttaaaggcgcacatgttcctaaagatgaagaaattaaagatagaatgctgttaactgacccatttaaggtggttttaaatgacagtgaccaatctgtttttcttaaaatgaagggcatggagctggacctaggtggaattgctaagggttggattgccgaccgaattcgtgacttgtggcgtgcatatggcgttgaagcaggaattattaatctgggcggtaatatcttgttagttggtgattcgcctaaaagaattagtggccagtggtcaattggtgtgcaagatcctaaacagccgcgaggcgacaatattacgtcagttatggtgcctgaatgctcagccgttactagtgggacatatgagcgctacttagtagttaacggtaaaaagtatcatcatttgattgatcctagaaccgggtatcctgtaaagactgatttagctggtgtgactacttttaccaaaacatcggttgaagcagaaattgaatgcaaacgattattctttgctggcaagccactaaagggttggcatgataaccctgatcgaattggtgcaatctttgtttataatgatgaacatattgaatatgataatttcggtgattagtgaaatatgctataatgactaaagaaaaaggagtcctagggactccaagcagcccgctttaagagcggcggcttcaaatgttaaattttacgttaaacgctactcaataactggccaaagtatgtttgagcggcgttttttatttttggtggtggtcaatatatgtcagcaaagccaacaaaaatgtaccgaacaaaagcatcaaggagatactctcgtaaaccgacatggctggaaccctttcatcaatgtagcccataggcctcacctccgggggggagaaccagccgccgctcataaaacttcctgcgctaataagtatatcgaatgttggttcataaatgtagtattaatttagttaaaacatatcaataaagatctgctcagtatgatacaagcagatcttttttgatatattttatcccacagttttgccaatattaaagatattattgaagacaccgtttgaaagccccggtgtgttgtaaatgataaacctcaaaaagctagaatcaattgtttgctgcataaaccatggattttgtagtgcattgaacatggacaaaactacataaacaacaaaataactagcaattagggaggctagagcacccaagacattgtcgagaatactgcctaagttagtcgcatgtggatttttgttaggaatccagcttttgacaatcttcatgatcattttgcccacgaagaaaacaataaagaaagcgacaaagcgtgcaatcattaattccacgttgttagtggagttagtcttaatcatttctccagtgtattgtgtgtatagccaattaccaaatggattttgcatgaaaatggcaaccataaagacaatggcggaacagattaaaccgatgatatagcgtgtaaagcctgttttatagcctaaatatgttttatatgctaagtaagctaaaacaattaaagtaacaatcatatttttaactcctttgcgccttattataccctattttgcgggcggcaaaactttgacgattgagtaaaaatacttcataatacgcgtggtgctagttaaatcgttctaggcaatatgccatattataagctaaaatggctatttctagccgctgctgaaaaccagctaagcaaagaaaagtcgctctcaattgttcttctaattgccatcagttgatgatcgttatgctttttagcgcctttcatgtttcttcgatatggtgtccaaaggacatagcccataccttttaactcggcagttaagtcttttcctaagtagccttcatcgcctaaaagataatggttaattggatgagcattaatcatcaattctgtcgtttctttggcatcatgcactgatgctttagttcaagtacatagccatcatcgcttactagcgcgtgaaccttgaagccgtaataatagatttttttagtggctttctagccgatatcagctatgccacgaaagatcttgacgcgatagttgcggataggctgacaaactgggaaactgtcaataattaagaattctccagctgtttttacttcttgattccaatcttgacggatacagcgcattaaaggcaaaagcattcgtgcccgacgattaaagcgagaatgagacaaaccgacaaagaatttacaaaatcttctttgagattcgataccaatttcagtttgccaaataagcatcgctaagatggagctgtcagaaattttaacctgatcaacatttttacggtgcttcaattcatcaggagcacaaagcttgtacaaagaacgacaaattacatttaaccgagcaaagctaacttgtaaatggtgagaaaaacgattaagcttgagatagttcaattagatcggactcttttctatttaatttaagttacaacttgagtctaatccgattggacttttttattaactagcaccacgcgtttcataattgataagatgaaatatctttactacgcgtggtgctagttaaatcgttttagttaataaaaaagtccaatcttgttagactcgacttgtaaatagtaataatagaaaagagtctgatctgattgaactgccttaagcttaagcgttttagccaccatttacaagttagttttaaagatttagtgataatttgtcggcactggtatcgtttgtatgcaccggctgagtttactcatcggcgaaatattgatcaaattaaaactacggacagtctgattttggctttacttatctggcaagctaagacaggaattgaatcacaaagaagattctgtgaatgtttcaattgtttatcacactcacgttttaatcggcgttcacgtcagctattgcaattgatttatcagatacggcaagaaatgaataaaaaggttgacctgaatggacagttcttgatcattgacagctttccggtacctgtttgccaaccaattcgaaactatcgtgctaaaatttttcgcggttatgccaacattggttataaggccaccaagaaaatttacttctatggtttcaaagttcatgccattgttagcgatgacggttacattcttgattatgtcgtaacaaaggcatcagttcatgatgccagggagacagttgaactgatagaaaatacccatccatctaattactatcttcttggcgacgaaggctatttaggcaaagaactgcatcaacagctaaaacaaatgggttacgaactttggacaccatatcgtaaaaatatgacaggagctaaaaagcacaatgatcatcaattgatggctattcgcagaacaattgaaagcgacttttcgcttctgacctattacaatgccgagaacaatcgagcacgtagtctgataggctttcaaagccggttggaaattgcaattttagcttataatttggcttattgtctagaacgatttaactagcaccacgcgtatctttactaatcaatgcattttgcgttaaatttagaggtgtgaaacacggtttcacgggtgaaaaatgaatcctgaaaaatttattttagaactatcaaaacacaattttaaattaactgaccaacaaattgaacaatttaaaatatattttaattatttgatcgaagttaatgagcatgtcaatttgacacgaattaccgaagaagatgaggtttaccttaagcacttttatgacagtattacgccgctgtttacttttggcgatgtttttaaagatggtgctactctttgtgatgttggtgctggtgctggttttccatcaattccgctcaagattttgcagccagaattgaagattactattgttgattctttggcaaaacgattgacttttttaaagaacttaattactaagttagacttgaaggacgtcgaattagttcatggccgcgctgaagacgttggtcaaaataagctttatcgagaaaagttcgatctcgttactgctcgtgcggttgcgcggatgagtgttttgagtgaatattgcttgcctttggtgaaaaaagatggttactttattgccctcaagggaccaaaagccgaagatgaattggatgatggtcaaaaagctcttgaattgctgggcggtaagctgattaaggaagaagaattgactctacctgagagcgaagaagaacgaactctaatcttagttcaaaaagtcaaagcaacacctaaaaagtatccacgtcaagcaggcaccccgcggcgcaaaccgattcattaaacagaaaggggtatattatgtcattattttcttttatgcatcatgatgatgaaattcctaagaataaacaggttcaagatcttgaattgagcaagattgttcctaaccgctatcaaccacggcgtgaattttctgatgattcaattaaagaattagctgaaacacttgataaggatggcttgctccaacctatcgtagttcgtgaagatggcgatgacgagcaatatgagattattgcaggtgaaagacgttatcgtgcagctaaaagcttgggctggcagactattcctgcgatcgtcaagaatatgagtgatgatcaagctgcttcattagctttgattgaaaacttacagcgtgaagacttaaatccaattgatgaggcaaaagcttataccaatttaatggaattgaatgatttgactcaaactgctttggctaaaaatatgggtaagtctcaatcttatgtggctaacaaattgcgcttattgaagctggatgataatgtgcagcaagctttgattgctggcaaaattaccgctcgtcatggtcgtgcaatgatcggcttaagtaatgcagatcaagatcgcgttttgacagaaattgaagcaaaaggcttaaacgttaaacaaactgaagagattgtgaaagatgtggatgcttactttaaccctaagcctaaggctaaaaaagaagctaagcgggtcgttagccgagttcctaaagacttaaaggtacaaattaacaccattaagaaggcggttaagttagccgaagactcaggaattaaagtcaaagtaacagaaaataaagatccggatgattataagatcacaattgaattgaaaaggaagtaatagggaaggatgaacaatatggtaaatgtaatttcggttgcaaaccaaaaaggtggcgtaggtaaaaccactacgaccatcaatttagcagcctcaattgccgaccgtggttatcgcgttttaattgtggatattgatccgcaaggtaacgccacctctggtttaggaattgaaaaatcagagattgaccaggacatttacaatgttttgattgacgaaattcctattcaagatactattcaccatacttcaacgccaaagctagatatggttccagccacaatcaacttgtctggtgctgaaacggaactaatttcaatgatggctcgggagacacgcttaaagtcagctttagatgcaattagcgatcaatatgattttgtctttattgactgtccgccatcattagggcaactttcaattaatgcttttactgcatctgattcaattttgattccagttcagagtgaatattatgctatggaaggacttagccaacttttgaacacaattcgtttagtccaaaagcattttaataaagatcttggcgtagaaggcgttttgttaacaatgcttgatgccagaactaacttgggtgctgaagtggttaaagaagtgcagtcctactttagcaagaaagtttataagaccatcattcctcgaattactaaattagctgaggccccaagttatggtcagccaattacagaatatgcaccaaaatctcgtggtgccaaggtatatgatgatttagcaaaagaggtgttaaaagctcatgacaagagactcaagaagtaaagagccaagaaaaaagggcggcctaggtcgtggtcttgaagccttatttgaggatgagcctcaagttcaagaggcagaagaagtccaagaactcgatttgggcgatattcggccgaatccttatcagcctagaaaaagatttgatgataagagcttaaaagaactgtcggattctattaaggaaaatggtgttttccagccaattatcgtgcgcgaatcagttaatggatatgagatcattgctggtgagcgtcgtttccgtgcttctaaattggctaagaagaagactattccagcaattattcgcaagtttaacgaaagccaaatgatggaagtggcagttctagaaaacttgcagcgtgaagatttaactccacttgaagaggcgcaagcttatgaaatgctgcagaagaatcttggcttaacgcaagaagaagtttcgaagcggatgggcaagtcgcgaccatatattgctaattatttgcgtttgctcactttacctagcaagactaagcgtttactccaacatggtgaactgtcgatgggacaagctagaacgcttttaagtttgaaagataaggaaaagattgatgcgctggctaagcgagtagtcaaggaagggatgccggttcgtaaagttgaagcggttgtcaatgaactgaatgctaagaagccacgcagcaagaaaactgctaaaaagtctgcttttatccgcgctagtgaaagccaattagctaacaagtttggctctagtgttaatatttcggaaacacaaaaaggtaagggtcatttatcgattgattttgcttcgactgaagaattgaaccgcattcttgatttgttaggtgttgatttagatggctaaagaaattgtttataatttggctgatacagttcaaatgaaaaagcctcatgcttgtcagactaatgattgggaaatcctgcgcatgggtgctgatatcaaattaaaatgtatgggttgtgggcacatagtcatgatgccgcgcagcgagtttaaccggaagctaaaaaagctattaactaaggcgaatgatccggttaatgcaaaaaaagagcaatatgtgccaaaagatcgtatcgctcggccaaattttggataaaatagacaagtaagtaaaaataaaaaattgattttagaaaaagaggacaacaaatgtcattaactgctggtattgttggtttaccaaacgttggtaagtcaactttgtttaatgcgattactaaggctggtgccgaaatggctaactatccatttgccaccattgaaccaaatgtcggaatggttgaagttcctgacaagcgtttggcaagaattcaagaattgattcctgctaagaagattgtgcacacaacttttgaatttacagatattgctggattggttaagggtgcttcaaaaggtgaaggtcttggtaacaagttccttgaaaacatccgtcaaactgatgccatcgttcacgttgttcgtgcctttgatgatgacaatattacctcagttactggtaaggttgatccagaagaagatattaatactattaacttggaacttgctattgcggacctcgatgctgttaaccgcagaatcaataaggtaaagaaggttgctcaacaaggcgataaggaagccaaggctgaaatggctgttttgaataaattgcagccagtacttgaagaaggtaatgctgcccgttcaattgactttaatgaagatgaacaaaagattgttaagggcttgttcttgttaacttccaagccagttatctacgttgctaacatcgctgaagattcaatggctgatccagaaagcgacaagtattaccaaatcgttaagaagcatgccgaaagcgaaggtgcagaatgcttaggtatttctgctgcaactgaagaagaaatcgctggtatggctgatgatgaaaagaaagaattccttgagatggaaggcgtagaagaatcaggcttggatcgtttgattcgtgctgcatatcatatcttaggccttagaactttctttactgccggtggtcctgaaacccgtgcctggactttccacaaagggatgaaagctccacaagttgctggtgttattcactcagactttgagcgtggttttattcgagctgaagttgtttcatttgatgatttagacaagcttgaaactatgcaaaaggttaaagaagctggtaagctgcgtcttgaaggtaaagattacgaagttcaagacggtgacattattgaatttagatttaacgtctaggagtaagaatggctgaagagacaaagagagaacaagatcaaacaaaaattaacactgaaaaacaagctaaattaaagaagcaagctgagcttgatactcaggatgaaaaaattaagcaggaagatccaaaagctttgcgtgaaaagttgagtaacaagaacagtgactatgtttttcgtctagaaaaagaactgcaaaaacaaggttcaatgtcacgtgctgatgcagttgcgatgactaatggcttgctcagtgaaattattattgcccaacgtcatgggcaaccagccaatgggctttacctggcttcaccagcaattaaggctgaacaaatgcttcatcctaagaaaaagccagtggctacaccaacttggcagttgatggttgatggcgcattgctttatttagcaatttttgttggtttatgtggtatccttgcattattccaaactaagaaccaaccgtataattcacaaatggggattctgacaattgccagtgtaggtattttaatggggatcttcatggttaaatacaatgattggctaatgcctcagcaaggtaaacgtccttcattggttaagctgatcttaagaatgttggctatagcagttgttttgtttgtctggatgtggattttgcaaatcccagcattgcgcgtaatcaacccagttttaccagcagtagctgacatcgttatcgcggcggctgcctatggtgtacgttatttattcagaaagcactacaatattgttggttccgcatttgcaccaaggccacaacaacataaataatttacctgttttgcaagcatgttaattgaatttccgtaaaaataagcacatacttaaacttaatatagataaaaaagataaatggagatgatccatttatctttttatttgcgagattgaataaaagaatagaagggtgggtctctatgatcaaaacattgagcaaatcaattaggcaatataaaaaattgtctttgctctcaccaatgtttgttattggtgaagttatcattgaaatgctgattccatatttggtcggaattttgattgataacggaattatgaagggggatatgtcctatattagtaaaatggggctattgctattagtgttaaccgttatttcgctaattttaggcgctagtgcgagttatgtctcagctcatgcagctgctggttttgccgcaaacttgcgccaagacatgttctaccatatgcaggactattcttttgaaaatattgatcacttttcaagtgccagtttagttacacgtttgactactgacgttaacaacgtgcaaatggcatatcaaatgatcatcagaattgctgttagagcaccaatgatgttcatcgttttaattattatgtcaattattattagtccgcgtttatcattaatctttgcagttttaggaccggtttttgcaattgctttgggtttgattattaaaacagcttatccatactttcctaagatttttagagggtatgaccgaatgaaccaggttgtgcgtgaaaacgtacgtggtattcgtgaagttaagacctatgtccaagaacaaccgcagattaaagaattcaagaagtcatcaggctttatttacaagttgtttgcgactgcacaaaagattatgtctttgaacgcattagtagttgcagctgttttgaatatttcaacgctgtcaatctgctggttcggtgcaaaagaagtggttggcggtagtttacaaactggtcaattaatttcaatgtttacttattcaaactcagttttgtttagtttaaacattttagctatgattactacgcaattggttatctcaggtgccagtggtcagtgattacggaagaaccaacaattgaagatcctaagaagccattgaaacgtttgaccaatggtgaaattatctttgatcacgttagctttaagtacgaacctgcggacaaggctgatgctttaaaagatatcaatttgcacattaggccaggtgaaacaatcgggattattggtgaaacaggttcatcgaagtcaaccttggtttcaatgattccgcgtctttatgatgttacttctggtgccgttcgggttgcaggacacaacgttaagtcatatgacttgaagaccttgcgtgataacgttgcgatggttttacaaaagaatgtgctgttcacaggaacgattaaggataacctcaagtggggtaacgaaaatgcaaccgatgaacaagtaattgccgctgctaaaatcgcccatgctgatggctttattcgtgaaatgccagatggttatgacacaatggtggaacaaggtggtaacaacgtttctggtgggcaaaagcaaagaattactattgccagagccttgcttaagaatccgaagatcttgatcttagatgactccacttcagctgttgataccagtactgagcgacaaattagaacgtctttggctaaagatatgccagaaactactaaaatcattatttcacaaagaattgtttcaattaaggatgctgatcggattatcgtcatggatcatggtcaaattcaagctatcggaacccacgatgaattgatgaagactaacgaactttatagttcaatcgctaaattccaggaagaacaaggaaagtaggtgagcaatttggatcaagcaatggaaaaaagtaaaaatcaaacaaagggtagcagaaccaaaatcttattgcgcctattgaaactggttaatagtacaagtccatggatgctcatcgtttccatgatcactattgtgctagcagctgccagcaacgttattggctcgttattcattgaacgtttgatcaataattatattgtgcctttaactaaagaaaaagttcctaactatggccctctagctactgcaattgcggtaatgtttgggatctatgcgattggttttttgtctaattacctttttaacatgctgatgggtgttttagctcaaaaagtgcaatatcgtgtacgtaacgaaatgtttgttcacatggaaagcttgccaatttcatactttgaccaaaatgaatttggtgatatcatgtcgcgttatactaacgatattgataccttgatgcagatgatttcacagtcaattccacaatttactaactcagctttgagtttattatttgtagtagttgctatgttttcacttagttggcaattgactgtgttctccttcattatttttgctttatcatttggaattgtgcgctacttaacggttagatcaagtcacttcttccaagtccaacaaaagaagctgggccaaatcaatggttataatgaagaaatgcttaatggtttgaaggtcatcaaggtcttcagccatgagccacaatctaaggaaggctttgacaaatataatgatgagttgcgtcaagcctcaggtaaggctaacacttacgctacaattttattcccaattatgggtaacatgggtaacttgctttacgttttgatcgcctttgttggtggtgctgctgcaattaatagttgggctccgctttcacttggtgccattggttcattcttacagttatctaagcaattcagtatgccaattgcccaaatttcgcaacaattaaactctattgtaatggctttagctggtgcagaaagaattttcaacttggaagatcaaaagtcagaagctgaccaaggtacagttactctttctaagaaaaacgatgaagtcggcagtaagtggtactggaatgtaccacaaaaagatggctcaaccaagaaggttcaagttcgtggtcatattatttttgatcatgttaactttagctacgtaccagatcatcaaatcttgcatgacatttccattaatgccaaaccgggaatgaaggtagctttagttggtgaaaccggtgcaggtaagacaaccatctctaacatgcttaaccgtttctacgatattgattcaggaacgattacttatgacggtattccaattaaaaacattaaaaaagatgatttgagaaaatcactttcaattgttttacaggaaacccatctctttactggcacaattatggacaatatccgctttggtaatccagatgccagtgatgacgatgtttatcaagcagccaagttatcacacgcagatgaatttatccatgaccttgatcacggttatgaaactgtgattgatggtgatggcggcgacctttcacaagggcaaatacagctgttgtcaattgcgcgggcaatgattgctgatgagccagtaatgattcttgatgaagctacctcaagtattgatactcgaactgaaaaaatggttcaagccgggatggacaacttgcttactggtagaactagttttgttattgctcaccgtctgtcaacgattgttaactcagatttaatcttggtacttgatcatggtcatattattgaacatggtaaccatgatgaattaatcaagcaaaagggttactactatgaactctacactggcaagaaggaaattcaataagcgttaaacaaggcagctgctacttaatcgtgttaggataagggcagaaagaaggcctttattatgaaaaagggtagtctatggctggtatcaatcttattggtactgcttggagtgatagtctactgggatcatggttttaaagattttggtcggccgggaatgatcttaacttcagttttacttgttttaacgattttaattgcattctttgcgacagttagtgatacctttaattcttcgatcggctcctggtgggttgttccagatggtatcttattcggttttgctagcatgcttgattatgcaacagcacctaagatctgctgttttgctttgctatttatcgtctgcgtttatgtcgaaactaaattgcatgatgataaggtaaagtaaatagaatgaatacacgtttttcatgatggagaaacgtgtatttttttagcttttgtttaaaaaggataatgaaagcagtatatttttctaaaatgtgtaaaatattctatatgatatctgctaaactgtagatagaaaaacagagaataataaacaagaagggggaacattcctcgtgaaaattttagttgttgatgatgacaaagaaatcgtagaactattaagtatctaccttaaaaatgaaggatatgaacctgttgcggcatatagtggtaaggaagcaattactaaattgaccactacgccagatatcgttttgatgattttggatgtgatgatgccaaatatgtcaggaatcgatgtaattaaggaagttagaaaagactccgatattccaattattattgtttctgctaaaaccggtgatatggacaagattcaaggcttaatcactggtgctgatgactatgtttctaagccattcaatccacttgaagtaatggctcgtgtacgttcacttttgagaagaagtcaaaagcaagttaagaatgaaaaaccagatattttggaagtaggaccattggtaattaaccgtgattcacatgaagttaagactattgatggtaagactatccaattaactgccttagaattcggtatcttatacttacttgctagtcaccctaaccgtgttttttcagctgatgaaatctttgaacgtgtttggcaacaagaatcaattgtttcagctaaaactgtcatggtacacgtgtcacaccttcgtgataaaattcaaaaagccactgatggtgaggatgtcatccaaactgtttggggcgtaggttacaaggtcgaggcataagatgaaaaaagaacgcgtcaagctaactggcgccgaaaagagcgaattgtttgcagaaggggtcgtaacggtcgtccttctgtttttattaaatttatcaattatcattctgattcacttagctattttgcaggatgaaagcctggtcaacggaatctactttctaaaaaagacgatcacttttgcaggtggctatcatctctggtcctggcaaaacgtattcatcgtcttaatgggagtgggcgacttggttgttttgtactggcgcttgattcgacgctatcaccaaatgcagctacgtcacattattttggaacttcactatattgctaatggtcattttgatcatcggattaattttcgggtacgaccagaattgcaacgagtagtggattcgattaattcgttggttgatagtactgtaaattcgattaatgaagaacgggcaattgagcaatctaaggatgaattgatcactaatgtttcgcacgatatcagaacgccgctaacatcaattattggttatcttggtttgttaaaagcaggagtgacttcgccagaagatcagaaaaagtatgtcaatattgcctatactaaggcagaacaaatgaaagcactggctaacgatctgtttgaatatactactttaaagtcgaccaatactaagttaaatctgaatgatttgcatatttattcaatgttggagcaggtagcggccggctttgaattagaagcagaaaaaaatggcattgaaatagagattgaagcgcggccaaagaatctaacgattaaggctgatgcggaaaagctggtccgcgtttacaataatttgatttctaatgctttcaagtatggtacaggggcaactaaaattaaattggtagccaatttagtcaacaaacgtgaagtagagttgcgcgttgaaaataatggggcaccaattccgaagaaatcattaaataaaatctttgagcgtttttaccgggtagaaacttcgcgaaatactaagacaggcggaactggtctgggattatctatcaccaaaggtgtggttgatttacaccatggtacaattcgctgtgaatcaaacgaaaagtggactagttttattattcgtttgccacttgatccgaagaaagcgtcaccaacacactagctgtgttataattttgactgaaatgttttaaatacaacgaggagaaaagttaatgagtatttccttaaatacctgtatattgatcttaaaagagcatcacttgctcaagtcaagcgcagtgcaagatacagtagctactaaaatggactatgtgtcttatgactcacgcgatattcaaactaatacattgttcttctgcaagggagcaggctttagaccaacttatttgtcaatggctaaagacaatggggccatttgttatgtagctgaacaaccatatccagaaggaaaaggaatgcacgctttaattgtgcgcgatgtttctaaggcaatggctcttttgtcagctgctttcttccgttttccacaagatgacttgtttgttgtagctttcactggtacaaagggaaagactacatcagcatactttttgaaagggatgcttgatcaagcaaatggtggtaagacagctctgatttcttcagttaatgatgtggtcggtcctaagcctgaagatagctttaagtcaagcttgaccacaccagagagtttggacttattccgagacatgagaacggctgttgataatggcatgactcacttggtaatggaagtttctagtcaagcatataagaaaaatcgtgtcttcggtttaacttatgatttaggctttttcctgaatattagtccagaccatattggtcctaacgaacaccctaattttgcagattatttgcactgcaaattacaattgcttgttaactcacgtaaatgtattatcaacgctgaaactgcacactttgatgaagtctacgctgccgcaacaactactaccaaccccgatagtatttatttgtttgcccgcgataattttgaaaatccagacttgaagcagccaattgatttcagattctcttctgaacaattagatatgaaagaaactcggttcaatttagtttgtgctagtgataaggcacgtaaattaccaattaatggtgattatactttaaagatgctgggtgatttcaacgagtcaaatggtactgccgcaattattggagcaggcttggctggacttaaccatgatcaatgtgcgaagggtattcgcgatgttactattccaggccggatgcaaaccgagagaacaaagaagcacggcatggttgtagttgactacgctcataataaggcctcaatgatggctttaatgagatttatgcgtaacgaattcaacgatcctaaaattattgttgttgttggagctcctggtgataaaggcgtgtcacgtcgtcccggttttagtgaaagtttgactgcatacgcagataaagcatttttaactacagacgatccaggctttgaagatccaaagagtattgccgaagaaattgattcaggaatagatcactctaagtgcgacgttactattgagttagatcgtaagaaggccattcatgatgcgattgccatggctacgccagatgatgttgtgctaatctgtggtaagggggctgacgctttccaaaaaattcgcggagtaaataccccatatccatctgatattgtggttgcacagcaggtaattaatgagttggaaggtcaagaagaacactttagaaagtaagtgaaaatagtgaaacacttctttagtattattggcggcatgggaactattgccacagaaagctacgttcgtttaattaatcaccgtgtaaaaatagctaaggaccaagattatttaaattatattttggttaatgatgcacaaattcctgatagaacggcttatattaaagatcatactaaaccaaactttttctatgatttacgtgacgatgttctgggccaagccaaattgggaccagacttctatgtgatgccatgcaataccgctcactatttttatgatgatttggctgcattgactgatattccatttttacacatgatgagaatagcagtgcatcaatttattgaaaaatacccacaagaaaagaaaattggcttgattgcgactgaagggtcaatctatgatcatttgtatgtggatgaaattcatgcggttcaccgtgaggcagaattaggtggtccggaaattcaaccgatggttaataagctcatttattccgatattaaagaaaagggaatggttgatggtaaattgtaccaccagatcttgcaaaaaatgcatgatgattatggctgcaacgtaatcttgctgggatgtacagaattgtcgttagctcaggaaaaggcaccagatcatccttacaatgtgattgacccacaatcaattattgcggatgtatcgattgaattagctttgaagattcgtaatggtatggattctaaaaaagcatgtgctaagtatatgtataagtaactctgcaatgaggtaaaaagctctgctacttgcagagttttttattaaaataaatgaatcgatgaagaacatgaaagattctaaaatggttgtagggatgcatcctgatattaatgaaaaagtcgaaaaagagggataaaaatgtatcaagaaaataaagatgatttaaaacaatggctattaagtaatattactgacctactagtaaatgaagatactaagccagaagaaagaaaaatcctacttgatgcaaagcatgagttagaaaatggtgaatcagctaattatgtctgcaacttaattcgagttggtcttgatccattaagctggcagggtaaattgtcacatgatgtgatgaagtttcattatgcaattactagttatgctcgtcccgtatcagctaaagcaggtgcatgtggtggtgctgccttaggaatggctttttcaggtcttatgggcaaataattattgattcaaaagggagattaagcgccatattttacttaatctcccttattttttaccaaataagtctaaaaaacgaccgaatctgtcacttttgtttattgaccttcaatttgtggcacaatatttttatgaaagagaaaacttgatgaacaataaaaactctaaacctaaattttcaggtttaaatatgctaatttcaattttaattggctgggcgatttttttctttggggcctgggcctgtatgaaatttagctcggaattttttgctatgcctcgctttattgcagtgattatagtttctatagctggggcggtagtgatcggaccagctatctatggctttttatacctggggagaaaaaagtaaatactaaaagatgttgacaaattgactaataaatattagtgtattagttgagtagtacagagaggaagtgtagacatgctggtaatgaaaataatttttaacgtgctaatcgcatatttggtaatttgcacagtaatttcaatcattagaactgtaggtgccaaacgcgaagagtggcatgtttacaacggccagggcatgagcttcaatcaagctttcgtcagatacttcattgaagatgcgactctgggtcaagtgacgatatagcgggggatagatcaatgctttacttagtatatattttaatcggtatgttaattgtcttgggcgttaatttgttaatcactgcattttgggctttacatgatatgtatgtgaaaaaagaaaatgcagatttacctacttttaaaaagtattttgtgaaaaacaataatattccaactaagatgtcggatttatttaactagaaactgtcgtaaggcagtttttttattttcatattttgtgtaatagttatttaaatgaaagtcgatactatcgcattttaaagtgaggtagtatggaaatttgcttttttagataaaaaaatcttcagttcttgtttttgacaccgcttacaaaagcggatacattagttaatataggatgtttcaatttggaaagaagtgtcaaagatggactttaaaaaattaactgcaacagatatagataatttgagtaaatttatctcagatccagagcgattcattactaagccaactgttcattgggatcatgaccaatttaagacggttagagcaatgccttacttggtaattcaacctgaaactaatgaagaagtcgaaaacgttgttaaatatgcaagcgatcatcatattcctatcgttccgcgtggtaattcgactggtctaatgggtggcaatttaaccgttgaaggtggcatttcactggatatggtgaaaatgaataaggttttggaatacgagccagaaagtctaacgatgactgtgcaagcaggtattcggttgaaagatattgaagaatatttagccaataaaccatttacttatatgccagctccagcaatgcattgggctacaattggtggtaatgtggatactaacgccggtgggttgaaagcaattaaatatggcgttactcgagaacatatccgcgaattgaaggttgttttaactgatggtaaactttacaaatttggcgctaaggcagttaagtcctcatcaggttattcgttaaaagacctgatcattggctcagaagggactttaggtgtagtaactgaagttaccatgcgtttatatccacgtcctaaacaatcgatcaatgcaattattccgtttcctaatttggataaagcaattaaatcagtaccagcaattttggcttctggtgtagtgccaacaaccgttgaatttatgggtagaaaagtcattagtctctgggaaaagtattacgatgaaaaattcccgattgcaaatggcgatggcttcattattctagggcttgattctttaactaaagaggaattggatgcggaattaaagcttgcccttgcagcaacgaagaagtttaaagcagctgatgcggtaattttagatgctaattcagaggaagcaaagaagatttggacttgtcgggaagcattgcttttggctattcaaaagtctacgccaaagatggatgaagttgatatttgtgtgccaattaatcatattcctgatgttttgcatagagttgatgaattggaacaagaggttggtatgcgaattcctaactttggtcatgccggcgatggtaatttacatatttatctttgctcagatgcaatgagtgacgaagagtttgagcaaaagagtcattatgtgattaccgaactttataagacagctaaagctttggatggaaatatgtctggcgagcatggtattggttatgcctgcaaagattggtttgaggatttctatggtcatgattacactgaacttttgagaaagatcaagcatgtttttgatccaaattatgttttgaatccagataagatttttccaatggaataaattaaataaaactgccgtaaggcagtttttttgtatttaaatacaaaaatttctgaaggtgttttttctggtatgacccaattgattagcttattgtgttaaaattgaaagcgaatacataacttttgattttttagaggtaaattatgattaatcaacttactgattttactaaagatggacaaaaaattaccttaaactatgagaatggaccaatgattttgaccgtgttaacaccggaaattatgcgattctttcaagatcgaggtaatgctagcaattcttatgctatcgaaggcgataaagaaattaaaactgattttacagttaaaaataaaggcgatcatattgaaatagctacggctaagttgatagtaaaagcttatgatgatgaaaaaattgacgtctttgatgaacaaggcaatccattggtcgtagattatcgggggaaaagaaccccaattgaccgacagatggatgaggaacatttgaagctggctgaatctgaaggccatgatgtggataaattactgggaaagcatgacgccgattattatgaagtggtcaagtcactagcagatgacgaagaattttatggcttgggtgataaaaccggctatttgaacaaacgccactatgcttatgataattggaatactgacaatcctgatccgcaagtagagagctttacccgtttgtataagtcgattccaattttattaggattaaaaaatggtcatccttacggtatcttttttgacaatacttatcgcaaccacatcgacttaggtaaggaaagtaatgactattactactactcagcggttgatggcaatattgactactacatcatcggtggtgactcactcaaggaagttattactaactacacttatttaactggtcgtgtaccaatgccacaaaagtggactttgggctatcaacaatcacgttggggctacagtgtcagtcaaaagcaagttgagaagattgctgaaaacttgcgtaagtatgacttaccatgtgacgttttacacctggatatcgattatatgcgcggctacagagtatttacctggagaaaagataactatgagtcaccagagaaattcgtagctaagatgcgtaaattgggcttcagaataatcacgattattgaccctggcgttaagaaagatgatgactataagatctacaaggaaggtatcgaaaagggctacttcgtaaaggctccagatggcactgtttatgtaaaccaagtttggcctggcgattcagtcttcccagactttggccgcaaagaagtacgtaagtggtgggctaagaactgcaagtacttagttgaccttggtgtttcaggtatctgggacgatatgaatgaacctgcatccttcaagggtgaaattccacaaaatatcgtcttccataatgaagaagaagcttcaactcataagaagatgcacaatgtctatggtcataacatggctaaggcaacttatgaaggtttgaagaaattcagtggaaaacgcccatttgtcattacgcgtgcagcatatgcaggaacgcaaaagttttccacagtttggactggtgacaaccaaagtttatggacacatgtccaaatgatgattccacaattatgtaacttaggtatgagtggattcagctttgccggtactgatatcggtggctttggtgctgacacaacacctgaattgttgactcgttggatcgaaggcgcattgtttagtccattgtacagaaaccatgcggctctaggaactcgctcacaagaaccatggatatttggcgaaccaaccttgtcaatttaccgtaagtacttgaagctgcgttaccgtttcattccatatctttacgatgaattctatcgtgaaactaagacaggtttgccaattatgcgtccacttgtccttaattatgaaaatgatccacaggtgtataacttgaatgatgaatatatggtaggcgaggacattttggcagccccagttgttcaagaaggtcaaaccaagcgtgccgtatatttgccaaaaggaaaatggattgatttctggaatggtgttgaacatgctggaaagaccacgattttggttgatgcaccaattggcaagttgccactgtttatcaagaagaacactatcttgccatggggtaaagaagttagccacatctctggtgaaccagacgagagtatgacctttagactatttggtaaaaagggtaagtacgttcactatcaagataacggaactgactttaagtaccaaaagggcgaatacaacttgtacaaggttaaggtaaacaaggacggtagcgtgaaagttaagcttgaaaagcacggcttcggtcctgtatatcgcagaattacggttcaattgcctaacaagaagattgaatttaagtacaagaacggcgaatacgttagaaaatagatgtgataagatgaaaagaccgtgcagggatgcacggtcttttttgtagggtattaacataacaaaaaagctttgccaaagcagagccacacgttaatgactaagttgaggagctacctcaacgcgcacgctaaaactttttattcttgttctattgttattatagcatgttaaaatttaatgatcttcgctatttctctaagtaacggccatttttattacaaaaatagaatacacgtacattacgttatactatatcgtgttatagtataatataatgtagtatattacgatgtagtgaaaaggagtgcgctatgtttgtaggtagacatcaagaattagagcaattgaatcaggcgtatcaagaaaatgattttcaatttacagtgatctatggtcgaagaagaattggaaagacttcactgatcaatgagtttttaaaagataaaaagtcaatttattatgtagcacttgaagaaaatgcggaagataatctaaaacgtttttctgatgcaattagtatttttaaaaatacagatcagggtggaaaagaaaaatttgcaaattttgaggaatgctttaaagaaattacacacctagctcaaaaacaacgtgtaattttagttattgacgaatttccttatttggctaaggcttaccctacaattagttcaatgttgcaatcctacattgatcatgaattcaaagaaactaacctatttttgattttatgtggttcatcgatgtcatttatggaacgacaagtcttaggctaccaaagtccactatatggtcgtcgcactttagccttaaagcttgaaccatttaaattatcagaagcacatgaaatgttaccaaaactcagtaaagaggacgcttttatcatcaatacggtttgtggcggtgtaccccaatatttgagttatatgtcagacagcatgtcagttgcggataatattaagaaaaactttttgagtaaatcaggtcgcttatttgatgagcctaataacttgttacaacaggaattacgcgatccaactaactataattcgattatcaatgcgatagcttcaggtgcttctaagcatagtaaaattgcgcaatccgcccacttacaaactggtccgctaaccacgtacctgaataatttgatagatttaggtattgttgagaaaaagttaccggttactgagcaaaagaagagtaaaagcaaaaatatcgtttatcgtatctgtgacgggatgttccgcttctggtatacctttgttggcaagcaaaccgatctaattgagcgtggcttaactgatcttgcttgggtaaaagtacaaaagggtctatctgatttcatgggacctgagtttgaaaaatacagtcaagacttcatgtggtctcaggatatgaatgaaaaaattgttcctaatccgtttatccacttgggcaattggtggggaaccgataagagaacacatcaacaagttgagttagatattgtaggattctctgacgatgaacgtgatggatatttcggcgaatgtaaatggaagaatgaaccgatctctcgtagtgtgttagaaaaattgattacaaatagtgaaatcttcaagtatccacttaagcattattatctattttccaaatctggctttacggatagctgtcaggaattagctaagaaaattaattgtcagttgtttacgtttgaagaaatatgaaaccggatcggtacgaaagtatgactgaattggtatcttttttaatttacttaaaagtacatgatatattaaaggtgtaaacaagttgagtataaaatcatgaaaggatgaaatatcatgaagaagcaaaatgttaaaaagactgttttgaaggaagaagaattgactaaggttgttggtggaagcacggcacatgttggttttaatttcttgagtaaaaaactttggaataatatatggaaaagatagtcttatttctttttcttaatgttttttctagtttagcagatgtatggtgtttttttaaaatatcaagagtaagatctaaaaagagacagattctatttttgtgtattgctaatatttttttagggttgttattgtctataggtaatattggcgtaatcttcacaaatatacttgaaactttgctttttgtattatatttgagaaaaaataatacattagaaatactatttggttcaataatattagtatgcacattagatttattagttgatattgtgtctgatatgatcactcaggttatgtcatttactttgataggccaattatcactacgtttcttactaatactaatgatgatagttgcaataaaactaggtaatggaaaaatatataattatctagcaaaccaaaataataaaattttcgtaggcatattagcttatacctatgtttctacggtgagcatctctatcatatatattcaaagcaaatcttttacaccattaactttgttcttttctctctatattcttatccaaactatttttgctatatttatatatcatgaaatgacgatggtacaagaaaaacttttaaataaaaaggatcaagaaaaattaaagcaacagcagcatcagcttgaagaatatgcttcttatcttgaaaaaagtgaagatgatcttcgcgccttcagacatgattacaaaaatattcttaattctttaaaggtaagtgcgcaagaaggtaacgttcaagaagtaattcagaaactagataaatatactgaaactaacctaaattctaaagccttacttaaatataaagacctaaatcacatttacgttaaatcaattaagagcattattattccaaagataacagaattgtataatttggatataccatataattttgaatgtcgaaataatatccgtaatttaccagaccatgtagatgaactcgatctagtacgtattattggcattactttcgataatgcaattgaggaaagtaaagcattgattgccgaaaagcatgatattcgaagtgctgaagtccaaataatggtctattctgatgacccagatgaatttgagttcgaaatcagaaataaaatccaaaataaaaatatctcaactagtcaaattcaacaacgtggctttactactaagaaagaccataaagggcttggattagctaatattaaggaaattgagagtaaatatcctgatatgtctatttcttatacaattcaagacggctggttcgacttttatatgacaattgatacggaagatggtgaagaggatgagtaagttcccaatcattgtatgcgatgacgataaagatttagctaatcagattgctaagaatatcaatgcatctattcaagacttaatagatgataatgaaggttacgctgaattaaatgaatctgttacgtttgttgctaacgattttgctcaagcggtaggatacatagtcacaaatgatattaagaatggtatctacttcttagatattgaattaagtcgagagtctaaagctaagaatggcgtagatttagctgaattcatcaagaagaatgacgaaaatgcccagatcatcttcgtaacggcgtacgataagtacgctccattaacgtatcgccgtcgtatcggtgcaattgattatattagtaagtctatgtcgtctgataagattattcaacgtatcgaagaaacgttacgtaacgccttcgataatttatctaacagaattaagtttagtcaacgtgactttacttataagattggtcggcgcgtatgtaaagtggccgaaggcgatatacttttcattgaacacagtactacacagcataaagtacatatggttactgagaatggagaagttgagtataaggcaaatattactcagattgataaagaaaacccattcttggcaaaagtttcgcaatcttctttggtaaatcctaagaacattagtgcaattgacacgaaggaacgcattattatatttgataatggtcagatggtaacttattctagatcgtataaagccgtggttaaaaagcttgtagataaatttgaaaatattaaagttgagtagctcaatctagttagaaaactaaaataccgaatcggtaatgagaataaccgatttggtatttttttacatttagttttccaatcatgaaataatggattcaacttaatatgaggagtggaaaagatgttactacagtataaatcaatttatgtaccacaagtagacgaatcagattgtggagttgcatgcttagctatgattcttaaaaaatatcattctagagtatttttagcccatttacgtcattcagcccgcactaatttagaagggactaccgctctgggcttagttaaaacagcacaagcatttaatctaaaaactgaagcagttaaagctgacatgtccttgtttgatcctgatgcagacattcaatatcctttcatcgtacacgtcttaaagcaaggcgaattactccactattatgttgtgattaaggcaaccaaaaattatttagtgattgctgatccggatcctagcgttggtttaacgaaaatgtctaaagaaaagttttctcaagaatggacgggaattgccctttttatggtcccaaatgatgattttgagccactcaaagagaaaaagcaaaatctgtggtcactatttccatacatgttcaaacaaaagaaactagtcactaatattattttggctgctcttttgatgacaatcattagtatttgtagctcatacttcttgcaaggcttaattgatacttatattcctagcggtacataccaaactttgtcgatcctagctattggtttattgatagcatatgttttcaactctatcttttcttacgggcaaaattttctattggatgttctaggtcagcgattaagtattgatcttaacttacaatacattcgccatatttttgaattaccaatggaattcttcgtaactcgtagaacaggggaaattacctcaaggttctctgatgctagtcgaattattgacgcactcgccagtacagttatttcattatttcttgatctttcaattgtaattgtgatgggaatagttttggcaattcaaaattccactctatttgtgattactctactgtctttgccaatttatgcagtggtgattcttagcttttctaagaaatttgaaaagatgaataatgatcagatggagagtaatgctgtcttaagttcttcagtaattgaagatattcaaggaattgaaacaatcaaagctttaaatagcgaacaaacacgttatcgtaagattgatagtcaattcgtcgattacctcaagaaatcttttcgttacagtaaaactgaatctttgcagtcagctttaaagaccttcattcagttatctctcaatgtaattatcctctgggtaggggctaaggttgtaatgaacgggcagatgagcattggtcaattaatgaccttcaacgcattactatcgtattttgtagatccacttcagagcattattaatcttcaaccaactctacaatcagctaatgtagcacaaaatcgattgaatgaagtatacatggttaagagtgagttccagaaagatgctcagattagggatgccaagcaattagcaggtgagattgaatatcatcatgttgactatcattatggctatggagtcgatgtattaaaagatattaattcctgaattgtcaaattaagtgcaacagttaggttatgaagagatatattgcttgaagagttcctctgctgtgtgatattggaggattcggcgatatttgtggttaatggcatcagttgcctgttgaacataagcttttgacttgtctttcatgctcttgcccttagggaagaattgacgcaaaagaccattgcagttctcattggtgcccctttcccatggagaatatgggtgagcaaagtaaatctggcagcccttgatcttggtcatatccgcaaactcagagccattgtcaaacgtgattgatttaaaccaggcaggatgtctgtcaatctccttttgaagcagcctttggcatgtgcttgcccgatagtcaggaatcttgataactacttcaaagcgtgtggttctttcagtcaaagtcattaaagcaggctgattcttgcgtctgacgcctttaaccagatctccttcccagtgcagcggagcttttctgtcttcaatctctttaggacgctgttcaatggaattgccaagatgcttcttgtgcaaagcgtgaccgccatggctgtgatgacgcttgttcctgcgtcttttgagcttcataggcagatcaatattgcttatgtccagcaagccctgatcaatatagcgatagacggttggtgtgctgggacaagggtagcctggcatagtccttttgaattcaccaacgaactcatcgatgctggtggcatcaaatttagctttaaagcgtctggagagcattctcaaaaagacagcataatgcttcaatggattgcgctgatagcagtttttgcgacgcttctcataataaatctgtgcagtatcagcgtaatagtgctcatacaataaatagctgctgtctctttgcaggacgcttccgcgtttgatttcgcgactgattgtcgacttatggcagccaacttcttgagcgataacagtacgggaagttatgccggaatccagcattgcttgaatttgtccacgttgtacgctggttaattgatgatagtgcttagaaatgctagaatttgaattggtcatgaagatcttcctttcttgatttttcgtcacttcaagtttaggtcttcatggcctttttgtttaacacttagtgttgcacttcaattttaaatccgggaaagatattaatttaaaaatcgaacccaatgataagttggcaatcgtagggatgagtggctcaggtaagtctactatggtcaaacttttagttgatttcttctctccaagcaaaggcaagttaacttttaatggatttaattctactaaagtagataagcatgtcttacggtcatacgtaaactatgttccccaaacaccatacatcttctcaggaacaatcaaagaaaatctgctcttaggtagtcgaccagatattacagaaaaagatatattgaaagcctgtcagatagcagaaattgagtctgaaatcgaacaattaccactgcagtttgaaaccaagatggatgaaaatgccaagattttatccggtgggcaaaagcaaaggctaactattgcacgtgcattattgtcaccggctaaaattttaatttttgatgaagccactagcgggcttgatacgattacagagaaaaaagtagtagataatttaatgaaattaaaagataaaacgattatttttattgctcatcgtttagcaattgcacaaaggactaacaatattgtggttgtagatcatggtcaaattgttgagcaaggaagtcatgagaaattaatgcagaaacatggcttttactataacttagttgagaattaggagcaacgttatgaataataaagactatgagagtaccgaatactattcctataaattcaagaatttttcaactatgattattattcctatggcaattttagttctgatcttaatagtcggttctttctttgcaactagacaaagtacagttacatctaccggaattgtagaaccacaaaatacacttaatattgccaatagaaactatcatgaaggacaaattgttagaagaaatagagaaaaatggctagttcatcttgatgataaacaggagaatacagttcacttgtttccgatgattaaggctaaaagaacggtcaatgtagttacttatttcccaggtaataaaattggggcaataaaaaaaggccaaacactgtattttcaggtagctaatgctagtggaacaatggatagattagtaggaaaagtgaaagaaattggagtatatcccattaatctacgcggaaataatgtctatgaagtaatctgtaaggccaagtccaagaaaaatttgaaatatgggatggaaggcaacgcaactattattacaggtaagagtacatattttgaatattttaaggataaaattcttaaccaaaattaaaaggagctgaaaagctcttttttagttagaatcaaattccaattattttgataactgatttggtcaaaaagtgtactgaataagtctgataaccaaaaagatagctgataattgatatatttttcttagttataaaaaatacggaggaagatctatgaataagaaaaaaatattaatgttaatgttgagcccagcagtattattgatgatgaatagtactattgtgcatgcggatgaaggtaatacttctcaagagaataaaagtgaagtagtatctaaaacagaaaatgatgataaaaatgtttccgaatctgagcagaaaactagtagtaagaacgaagcagctcaaactcaaaataagcaggaagaagagccagcagcttctgaagatcaaaataatcagtcacagaatactaataatcaagatcctaataatgcaaatgaggaagatagtgaagatgatgaagatgaggtatctgttgaagattatgagaacaatgtaaaagattttcatagagtaaaaatgcaagaagtaaaagatcttctagcagagaaaaataatcaagaacatcttatgtatatcggtcgtccaacatgttactactgtcgacaattttcacctgatttaaaagatttcaatgaaatcgttaaaggtaagctgctttatttcaatattgatgctgaagaaggagcacatgagtatgccttcaaagaaattggtattccaggtactccaactacaatgagatttattaatggaaaaattattagtgcatgggtcggtggagaaaagacgggacaagagttatataactttttgtattctgatgcagctaataaattagtggaacaggcagtaattaaggatcaaccgaaggatgataatactactgaatctgaaagtaatgaaatacctgaagtgactgtagctgaagatgatcaaacacagtctagcaatgacgttgctattactgactttgttgaaaatagcgtatttgagaatgctgcaaatgttgctagctctactgcagatctgactaaagttacgacaggtaatcaagagtatgcggctcctagagctgaaactaagaagaaaactgtgaagaagccagtaaaacctaaaatcgtagccactaaggtcaagaaaacagctaaatcgcataaaaagaatattattctagcagcagttagtgaaaaacacggaagtgtgaaagaaaataaacaatttgattcagtaaaagtgcaaagcaagccttatagtgccgttaagaacaatcaaaatagaattactaagttaaagcgattggaaaatgacactattaaaaatggttctactcagtctttaccatctacaggtgagaaggataatatctggggtcaattaattggaatgattagtatcttaatcagtttagttttgggcatttcattaggaaagaaaactaaggaggaaaagtagatgaaacgaatcattatttctaaagatgaagtacttttaagcggaattttaggtgggtcaggttctgtagatgatattggtctaactgatactgaacacatgctacctttatacagtaagaaaggtggtaatcataaacgagacgtttatttggaaaatcctaagtttttccaaagttcttttcatagaggtagataataactagtagataagtattgaaaaaaatactggtgcgaataggctaaaaatatctccaatagaaaatatcgtaatacttagaagataacgcaaagaaacctatgaaacttgtgatttttttcgtaggttactatgctaaaaatgattatttgatttcgactcaagtttttggttttgagtggctatgttatagtcgtataattgatcatgttttattaaagtaaagagcgtgcgtatcagtttatgcattaatgtgatggcaatcttcttgtagccttggctatgagaagatttttttgttagccattctcataataagtgcattgtgtctatgtttttactagttttcggatttataaaacagaatatcaagttagcgtaacaattaataagaatcctttgtaaattactaatatacgaaaacttggccgatttggtaaatattttccaaatagatcttgtttcgtgctaaatcggtattatacgccaatgaaggtaaattgttttgtattattagtgtgtaagttgaagagaggtaaaacttaattcacttatgaaaattgtaattagaagttttataaaggggaaaaacatgaacaaatttgaaactttaacttatgaagaactgtcagctgttttcggtggtaacggtggtaaagcaagacgccgtagaaaaatcacaaattgtgctaaagctattggaatgggagcgttgaaggatggactaaaatatggcattgcaggcactgcatttggtactccaattggtacagtaggtggagctatatttggtgctaatgtgggtattattagcggatcagtttcttgtgtatcacatttgtaaaaaaggaggtaacttttatgatgaaagaaatgaattataaagaattagaaaaagtaagtggtggcactaactggcttggtgtaggtggatcatgtttatcgggtttcattgatgcgctccctagcggaagtggtatgataaaaggatgtgtagaaggcgctgttaaagatttcgccaaacaaaatagacataaaaaacataaacatagataatattaaaaaatagaaaattcggttaatagatttcctatttttcgatatgataataatggggtaaaaattatgaaaaataaaattttaaccgagcgccaagttagaaacagaagtatcatcgctggtattttggccctgttaataggattggtatgggactattttcagtacaaaacattaagctttggaacagtattttggaatatagttgaaagtgtagcctttgttatctttatgaatattttcatgaactcttactataagaagaaaagtaaaaagcagtagcttggaagataaaacataataccaagttagtttaacgactaatttggtatttttttattatctcaaaaaaatattttatttctgtattgcaattataaattatcgtaatacaataattataaaagacgagaaagagatagatagttttatggaagagagggatagatatgcttccagaaaagaaaagacagataggttcaattattggaatgctgataatgatggcaatcttagtgtttgctaacttaggcggaacatggagtgttcttagaattacattattagtaattggagtaacgggtgtaattggcagtgctatatacagaatcatccatattttgagaggatagaaaaatgaaaaaattaattttgaatttgcttacgatttttgcttggatttaccaaatattttgtgtgataggaataattatgtggatcgttatgggaggtgttgtgttatttggtatacataatccggattttcgtgctggctttgaaagtggtaggggtataaaaggcgtatcagttgataactatatcggtgcaatagtggttgtgttgctatcactgatcatgatgagcgttgcagcctttttaatctgtcgatatgccagattaattgttaagaatatcaagcaagaagtttactttgctgatagtaatttgaatttactcaagaaattattaatttcagttgctggatatacccttatttcaataatagattacattattttcataactcaccgcacttggttcgctaaatcctcgaataatgtactatacccaagtggtgtgacaactggtttgcttttcctagcagtactatacgtagtctacttggtattcaagtacggaatgaaggttcaggaggatgcagactcgattatttagaaaggttgatatagatgattgaagtgacactagattttatgctcttgaagcgaaagatgtcttcaaaggagttggcagagaaagttggtataacgccggctaacctgtcgattctgaagacaggaaaggcgcatggcgttcgcttcgacacgttgagcaagatctgtgaagtcttggattgtcaaccaggggatttattagtttataaaaaagatgaagaataaaatgcaaaatcagtccgaaaaatgacagaattggacggttttaccttttacataaatgatggggatatgattaatttaaaaggataaaagattatttcctgggagataatcgctgaattggaggaaagaacaatgctgtacttaatttatattgtgctcggtttgttaatcattttagccgttaattacgccgttacagcattcttagctgttcatgatttgcttgaaaatagagaaaaagatcaattgagttttggggatgcattcaagaaatacttcgccaagaacaacattccgactaagttttcggatttgtttaattagctgaaaatttccttgaggtaagaacaatgaataatgaaaaatttgctcgtgaaaacaaacgaattattgaaggcatgggaattggagcacttgttggaccaatattagctcttgtgatgatgtatgttaagactgctggttcgcctcaaccttttcaaattattatgtcgattggagccggattggctttcggtctaatgtttggtggcatcatgtccgcaagcttagtccttaataaaacggtcgcatcaaagattccatggcagaagaaagtgttgaaacttgcccctcaagttattggtacaggagtagtggttgcttcagctggtgtagtgattactttagtaaccaattgggggtcagttgatattgtaaaaacaattttttcaaccgatactttatggcagttctttgacggtgtacttctaggtctaataaccattagataaaaagttgaggaaaaattatgttaaaaatagaacacctaaataaaagcttcgggtcaacacaggttttgtttgatgttagcttcagtgtgtcagatgggcgtattcttggactggttggtaaaaatgggtcgggtaagtcgacgatctttcatagtattttgaaattcgttgattatgacggccagattagtattgatggacattctttcaacgctaaagattatgacaatattggctatctgcctgaagagcgaagtttgatgcctaagttaactatttcagatcaggtagtgtttttggctagccttaaagggatgccggctaaaaaggtaaaagaagaattgcctgattggttatcacgtttggctgttaaagggatccccatggataagattaagtctttgtctaaaggtaaccaacaaaaagtacagatgattgcaactttaattcatcaacctaaattgattattttagatgaaccattcagtggactagatcctgttaatgttgatctaatgaagcagctgattttggaagaaaaaagaaaaggcgctacgatcattttttctgatcatgatatgcgtaacgtggaagaattgtgcgatgacgtcgtaatgatcaatgatgggcatatcgtcttgaatggcccagtaaatgaaattaagaacagctttggcctaactcgaatttttgtcaggacagacaaaagtgctactgaattatcagccttaccaggtgtaaaagatataattttgcaaaacaatggaatgaagctgcttattcttgcagacgaaaaatatggtaaggatatttttaaccaactttcggccggtcaatatatccagacttttgaccaggaacctccaactttagacgagattttcaaaatgaaagcaggtgcgcgtcatgaataagatctggcttgtcgcaaaagaaacctaccgtagagaagtgaaaacttggtcatatttgctgatgattttagcaccgtttctgctcgtcttcttttcatttgttatcggaatggtatcagctggcggcagtgatgacaactatgtcggggtagttacttctaattctgccttaaagcaagcaattaaaaagtcagaagactttgacaactatagcactgaagctaaggctaaaaaggcgtataaagatgaagatatcgatggctatgttttaattgaacaaaagaataatcaattagctgcaacttactatagtgatgaaaaaatggacagtgatctaaaatcagagctgctaactagcctaaacaccgcccagcaacaattgaatttaagtaaggccaagctaacgacaaaacagactcagtctttagctacgcgagcgcaatttaagcaacaagttaagcatgttgataagaagagctttgataatgatcctgttaagcaaatttccttctgggttttgctgattatcttgtacatgcttgtgatcacttatacgcaagtaacagcacaagatatcgctacggagaagggtaccaagataatggaagtaatcttttcgagtatgccaggtggcgattatttcactgggaagattttaggtatttttggtgaaattatcacccaagtgttaatttatgttgttggttttgtggcagtttattgcgcggccccatacatcgatggctttagcgatttatttagacagtataagccgatgattgatcaagcaattggcaatctggcttcttggggattggtgtttacgataatcggcttggtattgtttattatctttgcagctttctgtggcgctttggttgctaaaagcgagaatgccaacaaagcggtgggaccactatctacattgatgttgatcgggttcttgttcacagtcaatatgcaatcaggtggggatacgatttttgctaaagtattatcgtacatcccgtttctatcatcatttgtaatgccagctagagtaattatgggtaacgcaactaatttagaggcagctatctctgctttaattgctttagccgctacagtagcgtcatttatctggattagaaaaatctatccaaacttgattttgcaaacagatgatgtcggcccatggcaaaactttaagcgtagcttgagaggctagacaaaatatatttaatagtaaaacgcgctgaatcaataatgattcagcgtgttttgcttttgcaaggttaatagatctttggttctctttcttagtcatctttacggattcttagtcaaatagggtaaaacgactaagaataattccaaatgacgaagaaaagatgtcgtttcaatcaaaaaacggcatcttttttgcatataaatgaatgttattgaacgataataaataaaaatgacattttttgaagaaaaatgattgattttggaggagaaagcgaatacaatatttatcgaggtgagaaatgatgctgactcaggagcgccaaagcttaatcgaagactatgttaatcaacacgagttatgtcgcgtaagtgaattatgtgacttaaccgcaacatctgaatcaactatccgtcgagatctaattcagatggaaaaaaatgggatccttaagcgtgttcatggcggtgcccaatcagttaaacatttttctcgtgatgtatcacaaaacgttcgcttcagtttgaatcatgacgcaaaaatcactattgctagatatgccgtgcagaattttgttcgtccaggtgacaatgtcttcattgatgcaggaacaacaacttatgagatggtaccatttttagcagaggttgctaacgtcaagattattactaatggtgtagagactgctttatgcagtttaaatcacggaattaacacaattctaattggcggtgaagttaaggacgatacgcatgctgttataggtcagaccgccttaagtcagattaaggcaatgaatttttcagctagcttcgttggtgctaatggaattgaaaaaaatggcaatctaactacacctgatccagaggaagctgcggttaaggcagccgaaatcaaacaggcaagacacgcttatgtattaactgataatagtaaaatcggtgagcgtaactttgctgtgtttgccaatacaagtgacgtgattgtggtaactgatcaactaaaaccaggtcaaaaacggtcattaccagtcggtattgaattagaggaggcaaaataggatgatttatacagtaactgttaatccagcgcttgactatgttcttcaattagaaaaagttaaccgcggagaagttaacagaactaacaatgattcatttttagcagggggtaagggaattaacgtttctcaaatccttaaccaattaaatgttgataatacggcatggggcttcgtaggtggcttcactggtaaggaattggttcgtcaattgaatcaaaagagaattgaaagtgatttcgttactatttcagataacactcgtgtgaatgttaagatccacgctgaaaaggaaactgaaattaacgcggctggtcctaacattaccgaccaagaaatcactgcttttaaggatcgtttaaacgatttaaagaagggcgacattgtagtaatgagcggttctcttactccaagccttccaactgatttctatcaatcattgcttcctactattaaagaagcaggtgcagaatttgttgttgatactactggacaagctttacttgatactttggcatataagccactagtaattaagcctaaccaccatgaattagcagacttgtttggcgtaacttttgattcaagtgatgtgatgcttgaatacgcacaaaagcttttagataagggtgctcaaaatgtgatggtttctatggctggtgaaggtggtttccttcttaccaaggatcatgtttaccatgctaagggtgctgttggtactgctgttaactcagttggtgcaggtgattcaatgattgccggcttcgttggtacttactacaagacccaagatcctaaggaaggcttcagaattggaatggcttgtggtgctgctactgcctttactaaggacattgcagttaagagccaaattgatgctgttcttccacaaatcaaagttgagcaaatttcttaataaaaaacgaggggaaaaatatgagaatcaaggatattttaagccctgactccatgattatggagcttaaggctaagaacaaagaagatgccattaaagaaatggctgaccttgaagtagcaactgatatcgttaacgacgaagatgcttttattaagtcaatctgggcacgtgaaaacgaatcaactactggtattggtggcggaattgcgatgcctcacgcacgtaacaaatctattaacaaggcacgcgtattattcgccaagagtaaggaaggaattgactataattcacttgatggtcaaccagttcacttattcttcatgattactgcaccagatggtgctgacaatactcaccttcaagcattagcaaaactttcaggtttgttaattgatcctgatttagttgaagctttgaagaatactaagactcctgaagaagttatcgatctttttgaaaaggctgaagctaaaaaagacgaagaagacaagaaggcagctgaagctaagaaggctaaggaagctgctaaggctcaaggtacaagtgatgacgacaacaagccattgattgttggtgttactgcatgtattaacggtattgcccacacttacatggctcaagaagccttgattaaggaaggtaagaagcgcggcatcgaagttagaattgaaactaacggttcagaaggggttaaggataagttgactcctgatgaaatcaagcgtgctaaaggtgttattatcgcttctgataagaaagttgatatgccacgttttgacggcaagcacttagttaaccgtcctgttgttgatggaattaacaagccaggcgaattgattgatgacattatgggtggtaaggctgatgtttaccgtgcaagtgctcaagacaagtcaactgaatcttcatcaactgagaagccaggtttgtgggcaggtatctacaagaacttgatgaatggtattagtcacatgcttccattcgttattggtggtggtatcttaatggccatctcattcatcgtagaaaactacatgggtggcgctaagactcctgctttcatctttttaaacaatgctggtaacttggcatttgccttcatggttccagttttggcagcctatatcgctgaatcaatcggtgatttgccagccttaatgccaggttttgttggtggttacatggcctctattgttaacggtcaattccaagttaacgttcaagctcacgcaacttcaccagccggcttcttaggcggtattgctgctggttttattgctggttacttgatggttggtttgaagaaagtatttgctaaattacctcgttctgttgaaggtatgaagccaatgctgttctatccaattttaggattgctctttattgcagcaattatgttctacatcattaacccaatctttagtggcattaactttgctattactcatttcttgaacggaatgggtactggtaacttggtacttttgaccactatccttgccggaatgatgtcaatcgatatgggtggtcctttcaacaaggctgcttatgtcttcgcttcaggtgcatttgctaacgaccctcactcagctactgctgctatcttgatggctgctgtaatggtgggtggtatggttccaccatttgctactgcaattggtactacattcttcaagaacaagtacactgtagaagaacgtcgtgcgggtgtttctaactgggtattaggcttctcattcattactgaaggtgctattccatttgctgctgctgacccaggtcgtgtaattccatcatgtatcattggttcagctgttggtggtgctttagttggtttatggcacgttggtgtcccagctcctcacggtggtctttgggtatcaccacttgctggtaacatcggtggtccaagccacatcttattctacttcctagctactattattggttcaatcgttgctggtttaatcatgagtttctggaagaagaatgtcaaagaagacccaaacgaataatactataagtaatatcgaatattattattaaataattctggttattaatcaaaaaacaatacattttggcaaaaacgtattataatataaatatcttgatgatctctacttaaatcaagatactctgttatgttttgcgctacccgaagggtagcgtttttttatacctaaatttaagctataataaattaaaaagtatgaatgggtgaagaaattggacgagcaaattattcggattactagagcgttgaatcatccgattcgaattcaaatcttatattatttaaatgataatcaaaaaagtagtgttaataatttagttaagcagtttgatgttagtcagccagctatttcgcgtcacttgcgtattttggaagaggctaagctagttaagagcgagcgggttaggcaggagcgctattatagcttagaagataagcatgtgattaaaatcttagatgttttgcgtcagcacgtgaaggaagaattttaatttagtttgacaattatataaaaatatgtttatataataatgtaattttagaacaaagcatttaataaaattcagcaaaattttatgacttaaattattgatagcatcaggcttatgggagactggtgctatttgtctatgcaaaaatatgttgacatatgtaattaactagattattctaacttttagttagaatttatgctgaattttctaacttaaatgcttttttattttgcacaaggaggatattttatgcaaaatgcgaaatctaaaattacgaagttaatctcttttttgggactaattggcgttattgcgctgttagtttcagcttgctcgaatagatcaaattcgacgagcaattcgggtgaagtctcgattattaccaccaccaatgtttatgcagatattgctaaaaatgttgtaggaaaatatggtacggctaaggcaatcattagcaatagcagtaccgatcctcatgattttgaaccaactacggcagatgctaaagaattgaccaaggcaaatattattgttgctaatggcttaggctatgattcttggatgaataagctagctagttctgttagcaaaaagcctgtcttagttggtgaagacttgatgggattaaagaagggggataatccgcatatttggtacaatctaagtatgccaaccaagtatgttaattacctagttaagcgtttatctaagcttgataaaaagcatgcagcttattttaaagctaatggtgacaagtatttagctaagattaatcaagttaagcaattggtgaagactaataagaaaaatagtaagccagtctttgttagtgaacctgtctttgattatgctttaagagaagcaggatacaagattggggataagggctttgaagaagcaattgagaatggtactgatccgagtcctaagatgattaatcaaatgaataatgaaattaaagcaaaaaagattgcattctttgttaacaatacacaggcaagcagttcaactgtgaagttatttgtaaaattagctaaggaaaataatattccagtgttaaatgtgcgggagactattcctaaccacactacttacttggcttggatgaaagaaaattatcaaaatttggctaaaatagaaaaataatagcaacttagggagggggtagaagagtgattttagaagtaaatgatctctcgatgagatttgatactaaagatgtttttcaagatttgagttttcagcttgaagacgggtcaatgactgcactacttggacctaatggaacagggaagaccaccttaattaagattttaatggggatgttaaagccgactgcgggcaactttaagtttgattcagacgttaagttaggttatgtaccccagtttagaaatattgatgcggagtatccattgtcgattcgtgcatttattggacttaacgccccattgtttaagaccaaaaaggttaaggaacagattgatcatcagttagaagaaactcatttagaaaagattcagaatacccgaatgggtgaggcatcaggtggacaaaaacaacgtgcatatttagcgcaggctctacttgatcatcccaatatgatcatcttagatgaagcaacagctagcctagatccggctgctaaggaagaattgatgggattaatcaagcacctgaatcgtgaacacaaaattaccgttttgtttgtcactcatgatattcctttagctaaaaagtatatgactgattatctatatttaaataagggaacgatcaggcaaggaaagatggataaatttaaggaggatttcgaataatgtttcaatacgaatttatgcgttatgccttcttagctagtacattcattgcgattacctgtggcgtggtcggtgtatatgtagtagcacggagttatgcttttttagctcacacactgtcagaaatcggctttgctggagcagcttttgccgtctttatcggcattgcaccgttatgggggatgctactatttaccttgctcggttcaattggagtaggagaattgtccttgcacagcgatcaaaaagaatcgtcagttagtgcgatctcagctctgtttattgggctaggtgtgctgttcttagccatttctggatcaaatagccgttacgctactaatattctgtttggtagtatcatcggtgttgataaacaaggcgtgattcagctagtggttttgtcaattctagttttactattaattattttggtagctcgaagcttgaattttgactcatttgaccatatcggtgccgttgcacatggtgtacatactggctgggttggtattgctttcttggtagccttggctatgtcagttgctatcggtgcccagattgttggttcattgctagtcttcattctattaacattgccatcttcaacggcgcgctatattggtaaaacaataccagcaatgatcagttggtccgtgtttttcgctttagttggcgtgtgggctggactgtatctcggctttatcaccaactggccggtaactttctttattgcaacgatcgaagtggtaatttacttaatcgcttatggtattcacgtaattaaacatcgctaaaaaaaacagaagtcaggctgaattcggtctggctatttttttacgcaaaaaaagaactactctattccacggagtagttcaaacatgatgtgagaaattttactttccattaattgttatatagtttgttggttaaacttgcaagtgaaatttgtgaaaattgtaatttaaactaaaattttgtgtcttattttaactttttacccaaatcatgattaaataatatagtacaacacttttgatgatggaggattttgatgtggattagatttgcgatcgcattgttgccgatcgtttggttgattatttcgctgggagttatgcgaatgccagctgcacgcgcttgtgtcattggcttaattttgacgatggtgttagcagtctttagttttaaagtaccggtgctagatacggcaagtggggcgctagaaggcattatcatgggcatttggccgattatgtttgttattgtcatggctttatttgcatataacgttactacagaatctggcggtatggaaattattcaaaatatgctggcgacgatttcaaccgataagcggattattgttttgattattgcttggggatttggtggctttttagaatcaatcgctggctttgggactgcggtagcaattgcggcaggaatattgattgcctttggcttggatccgattcgcgcgtcagtcattagtttgattgctaatacaactgcgacggcttttggtgcaattggattaccagttttaactttagctgaagtgacgggtctacatcaagaaaaactatccttcatcgtaacattgcaattatctattttggtaatactggtaccatttattttagttatcttgactgaaggcagcattaaggcaattaaaggtgtaggctttattacattgatgtcaggactgggaatggctattccccaggtaatagctgcaaaatttgtaggggcagaattgcctgcaattgttggctcattgtgttcaattgcgattacagtcttattaactagatggcatgatgatgaagaagagccagatgttttacgtccaaatgctaaggaaatgctcaaggcatgttcaccatttattttggtctttatcttcgtgatctttgcttcttcattagttccagctgtcaatgatgtacttaataaagtaaccactaatcttgttgtttatacaggaaagaacccaaatacattgtcaattagttggttatcttctcctggaacattaatttttgtagctacattaattggtggggcgattcagggtgtcagcttgaaaaaaatgatgcaaatattaggacaatcgataaaaagcgtatggaaaactacaattacagtttgtgcgattgtaggcttggctaaggtaatggtttatgctggtatgacgaatgcattagcagtggccttggttggccttttaggaccagtttatccattgtttgcgccgttaattggtgcactaggaacatttttaacaggatctgctacatcagctaatgttttatttggtaatttgcagtatactgcagcaacggacttaggcgtaagtaagtactgggttgtagcctcgaacatgacaggggccacggcagggatgctttcaccgcagaatattgcagtagcaaccggctcaattaatcgtgagggagacgaaggcgagatcctaaaagaaacggtcaagtggggcggtttgtatttggtagtctgctgtgtcttcttgtatatagttggcttagttgccgggatgatataagtgaaaaaataagagctagtagttcactaaaatgaattgctagcttttttaattatttactatttttcagttaaacctttaaattttattcaaccacatgtctttcaaatgggtcatcagaaatgccttcagccaaaatatctcttgaccattgcttagctgagaataatgagtggtcgcgataattaccacaagattcaatcgttgtccctggtacgtcttcccatttaatgttgtcacggatttcttctaatgactccttaagtgccttggcaacttcagtagttgatggggtgccccaaactaaaagatggaagccagtccgacagccaaatggtgaacagtcaatgtagccgtcgatgcggtcacgtaaaagaccggctaaaaggtgttcaatcgtgtgcaagcagccagtaggaatggcgttcttattaggttgaactaaacgcaaatcgaagttgctaatctggtcacctttttggcctttttcaacagtgattaaacgaacgtaaggtgccttaactttagtatgatctaattcaaaactttcaacttttcccatgatttttttctcctttgtctaaatctatttatctttattttaactagttaattgccatttagctccaaacttgcttggcagtgtcgacaaccaacttgatcttttgccactggtcatcttcggttaacgtgttgccttcttcagttgaggcgaagccacactgtgtgcttaaagcgagactatttagtgggtggaattcagcagcttctttaattctagcgattaatttttgtggatcttctaattctgcttttttactagttactaaacctaagacaacaagtttgtcgttaggaatttgtgcaattgggtcaaaactgccagatctatcattgtcaaattcaagataaaaggcgtcaacattttccttagcaaaaacatagtccgctactggaccataacctccttgggctgcccaagttgagtgatagttaccgcgacaaatatgagttgatattcgcaaatctgttggcaaatctttgattgcatcattgttaagcttcaagtattttcttttaaggtcgtctagtgaaaagtcatcttgtaaatgacttttccaatagcgcttatctacaatcataccccaagtacagtcatcgagtttaatgtcgcgacatcctgcatcgtataaggctaaaattaagtctcggtatgctttagaaatatcggtgagtaaatcttcttctgaactataaatctttttaagtgcggcaatattttcttctccacgaacaagttctgcgtaaaattgtgcgggagctggaatactttgccgtggaattacgttagcgccagtttcatcgacaaccttttttaagtattcaaatgatgaaagatctggatgtttaccagtaaatttaatttttccctcaacttgggcagagtcgttacgagtttcttcatcatggaagaaatagccgtgggcctgcttagtgtgtttaatacccccaaagccccagaaggtatcaagatgccaataacttcttctgaattcaccatcagttacgattttaaggccatgatcaatctctttttgaactaattctctgatctctgtattttcaacatgagttaattcttcttgcttaatctttccttcttcaaattctgcgcgagccttttttaattctgcaggtcttaaaaagctaccaacgatatcgtaatgtaattctgtcataatttttctccttagttttgcttcgatgttttatttaacgatgaaaagtccgatgatgatcaagatcaaccagacaatagtgcacattcggttgaatgcctttttactgatgatgatttgtgaacttgtagttttgataggtttatccattgtctggctcctttctgaaaaattaaataagcaaaataaaaagcgcccttagcatagaatttctatgctagggacgcctaagcgtgttaccacccaaattcaagttagcttcacaactaactccttactaagtgctcccaaaattgggaatactcggacggggtaacgatcgtcactcgtaaattgcttacttaacagcttgctctttaaactagctccaagaccatattcattactctcaaccacatcggcttgcaccaactccgactctctgcagaagtcttaagtaattactcatctcttctaagcttttattaatttaattgtcattataatacgacgattaaaagaagaagtcaaggaaatttttgaaaaataggtatcattaacaaataatcggtatcaaatctagtgaaatgataccgattatgttaatgctagtttttataaatacaaatttattagtaaaaatgtaaaacatactttacattttgaaaatatgggcttaatatcaaactattaaaagaaagggatgtgtaaaatgtcaaaatttgaaatattaaaattaatggcttttgcaagcttgtttgcagttatgactttcatcttagtcgttgtattcgtgggaaatcgtcgtgcggcaaagtatgatgaacgacaggaattgattcgtggtcgtggtgacaggtatagctttcttgtgttaatcgttggagaagtaatttctgctttattcatgcagacggatttttatacaaagcatggtattgctgttaactttgcaattattatgttgtcattaacggtgatgtcagtttacgatatagtccatggagcatattttgcatttaatgaagagcatgttaaggcaaatagttggctatatattttacttggtatttgcttgattctaggatatattgatgactttaacagtgcgctgaacattatggggatttattggttgattattggagcagtaagcctgtttcaactccatcgtgataaggaaagtgataaggattgaaaaatttaaaaatgaaggctgcgcgagtcggtaaagatttaacgcaagaagatttggcgcagcagattgatgtttcaagacagacgatttctgcgattgagaagggaaattataacccgtcggttaacttgtgtatcaggatttgccaggcgctggataagacattagatgatcttttttggccagaggagaaagaggattgattatttttagcaaaatatgattaggataatgcaaaatctgatgagcttaattttgagaagctagatagagttatgcttttatttgtaacaaaatggtaaatgaagggaagagaaaatatgcggaagctatctagttcatgtctaaattgtgggtggacgatcaaaatctaaacgctattttttcaagaagaagtcgaatagttggggaaatggttctggtggaggagcattttaattgaaaatgcagaatatgatctaaatggtacagaatatgacgattttaatcataaagttgcgctcgtagtaacattaacagtgtaaaaattgttagtgcattaaattgaaaggaagcataaataatgaaaaagttgaatgaagaagagctagttgaggttaaaggtggatttgctattactaatatggtttttaatcaaaatttgtttgcaatgaataatattgttaataagtcaaaacgcccattgtttcactttaattggaaaaagtttcttggattaaagtaatgatagcgatacagggattaatttcaccaatagtagatttatttattttttatacgcgtggtgctagttaaatcgttctagacaataagccaaattataagctaaaattgcaatttccaaccggctttgaaagcctatcagactacgtgatcgattgttctcggcattgtaataggtcagaagcgaaaagtcgctttcaattgttctgcgaatagccatcaattgatgatcattgtgctttttagctcctgtcatatttttacgatatggtgtccaaagttcataacccatttgttttagctgttgatgcagttctttgcctaaatagccttcgtcgccaagaagatagtaattagatggatgggtattttccatcagttcaactgtctccctggcatcatgaactgatgcttttgttacgacataatcaagaatgtaaccgtcatcgctaacaatgacatgaactttgaaaccatagaagtaaattttcttggtggccttataaccaatgttggcataaccgcgaaaaattttagcacgatagttgcgaattggttggcaaacaggtaccggaaagctgtcaatgatcaagaaatgtccattcaggtcaacctttttattcatttcttgccgtatctgataaatcaattgcaatagctgacgtgaacgtcgattaaaacgtgagtgtgataaacaattgaaacattcacagaatcttctttgtgattcaattcctgtcttagcttgccagataagtaaagccaaaatcagactgtccgtagttttaatttgatcaatatttcgccgatgagtaaactcagccggtgcatacaaacgataccagtgccgacaaattatcactaaatctttaaaactaacttgtaaatggtggctaaaacgcttaagcttaaggcagttcaatcagatcagactcttttctattattactatttacaagtcgagtctaacaagattggacttttttattaactaaaacgatttaactagcaccacgcgtattcatataattttcgtaacttttcgacaatgataattttaccagcttttatttttgtgattttactatttattggatcattttttgctgtgcatgaaaatgtgatgaatagtatgggagttattactccagatcgggtagtaacgttagagaataaagaatataaagaagggcaaaaattatctaaaggaattagtgtcactctagctgatggcaaaaaaggtatgttagaaaataatgttattattcatctagataataagaatagtgttgcgatgcctgatataagggatagaaagaaattaagagtaataacgtacgttcctagctctgaagtggctgtgctagataagggtcaacgtatgaagtttaatattgaaaataagcagggaacatctgaaatacttaatggaaaaattactaatataggtacttaccctgttcaacagaaaaaaataagtatgtttgaagtggaaactatggtaaaaactaccaagtcagagagaaattttttgcggtatgggatgcagggaaaagtgtcaattattacgggaagagctagctactttaattatattagatccagggtgctaaattctaaatgagttttgttcatattatgtactttagcagaatatgatgtgaatattgtcagtttatgacaatgtcatagaaaatcctgctattctggtaaagttatatatgtaagttgatgaggcgcttagaagtactaagcgaggcaggcttaaagatttatcggaggtattggaaatgaagaattttaaggtagtaaataatattgagctaaatagagttgttggtggtaaaattattcgattaactccatatatgttgtataatactaagacacataaaactatcccagattacggtgcaatttggggtaaagcgggtcaaaccgtagccaatggatggttacaatatggaccatggggcagtagaggttaattaaaaggaagcgacttaaaattgcaagataatggacaaaatcttaaaaaaattcttgaggaattaagacaagagactgtaaatgatcgagatgcaacgaagttaatcaatcaaggtttaagcaagttaactcagggtgttaattttgataaggtagtatttgaactgaaccgtgatttgaataattattcactagtacatggttttaaattaccacaggcactaattaggttaaagatcatgttaaatgagaatccagataagtggaaatttgcgggcttaactggttcgatctagaaaataaaaaaattcaatatcaaacagcatgtaaataatcgatatcatagttggcaaaatgatatcgattatttttgtataagcgcgattactgatgattttttgttaaactgttttggaaatacaaagtaaaatgatgctttatcaagttgtgtaacatagtgaaatatgatgtatacgcgtggtgctagttaaatcgttttagttaataaaaaagtccaatcttgttagactcgacttgtaaatagtaataatagaaaagagtctgatctgattgaactgccttaagcttaagcgttttagccaccatttacaagttagttttaaagatttagtgataatttgtcggcactggtatcgtttgtatgcaccggctgagtttactcatcggcgaaatattgatcaaattaaaactacggacagtctgattttggctttacttatctggcaagctaagacaggaattgaatcacaaagaagattctgtgaatgtttcaattgtttatcacactcacgttttaatcggcgttcacgtcagctattgcaattgatttatcagatacggcaagaaatgaataaaaaggttgacctgaatggacagttcttgatcattgacagctttccggtacctgtttgccaaccaattcgaaactatcgtgctaaaatttttcgcggttatgccaacattggttataaggccaccaagaaaatttacttctatggtttcaaagttcatgccattgttagcgatgacggttacattcttgattatgtcgtaacaaaggcatcagttcatgatgccagggagacagttgaactgatagaaaatacccatccatctaattactatcttcttggcgacgaaggctatttaggcaaagaactgcatcaacagctaaaacaaatgggttacgaactttggacaccatatcgtaaaaatatgacaggagctaaaaagcacaatgatcatcaattgatggctattcgcagaacaattgaaagcgacttttcgcttctgacctattacaatgccgagaacaatcgagcacgtagtctgataggctttcaaagccggttggaaattgcaattttagcttataatttggcttattgtctagaacgatttaactagcaccacgcgtgatgtatatgttaacaatatataacgataacatggatattgaattaatttggttaaaattatacatgtaagttgatgatgcgcttagaagtactaagcgaggtagacttaaaaatttatcggaggtataaaaatggaaaatactgttggttttgaaaagttaagttcaaacgaattggtaagtgttgtaggaggtagtaaaggatggaacaagttttggaagtcggaaggtaagtattggcgtggatttaaggaaggactatgtaaatatgcgaggtgaggaataattatgaaaaaatttgaaagtttaaaagatgaaaacttactagaatgtgtaggtggtaaaagaggctataattgctataaatttggtaaggatgttggtagaacagtaaaacttgtggcaccaattgtgattccattgttttgctgctgagatttttgtaggaatataaaactatgaaaaagcaataaaaatatacaaatatttttattttattaattttaggtattttagctataaattggcaagttgtagcgtctccaattaagaaactgtcaaatcttttgtgtaaatagttctttctcgtaaattgattttttaattatttatttaatcaaagtaggattctaaggtgtcctgaacctgaccaaagcctttatgaattcgattgaaataacggtcattgtagctcattgcctgaatgccaataaaagcatcaagcgactgttcagttggaaactctgccttaggcttagctttgcgcttgatcacattgttaaatgattcaatcatgttagtcgaataaattgaagctctgatctgcttgggatagttataaaagaccagcagatctggttctatgtctttcaagcttctgataacatggctgtaaaccttgccccatttggtatagaagtcatgcaggacagctgtggcttcttctttgtttgtctgttgatgcacctgtttgaattcgttcatgatcttttcacgatcgtcgacgcgtactttagcgcagatattgcgcatgacatgaaccaagcagcgttgaaaatgagctttaggataagtcctggccaaggctgttttcatgccaacaacaccatcagaaagaaaaagctcaacttgctttaagcctcgggatttcatgttttgaagcatatctgtccagacttcaatgttctcgctaggtgcaatgcagtagtcaatgacctccttgtgcccattaggcttgatgccaatggcaatatagactgcttcacgctcaaatgtttctcggcgcaaaggaaggtatgtcgcatccaaatagacgcagaaaaacttgtcgcttagcttgcgtttgtggtaagcctcaacctttggaatcatctgcttggaaatatttgatacctgggctggactgtaatggctgccatacatcttttcaattagatcggctatttccctggtggtcacgcccttggagtaaagcttgataatcatgctttccaagatatccgagtgctgcttgtagccaggcagcgtgtgctgatgaaattgaccgttgcgatcccgaggcacttgcacttcaattgggccaaattgcgtatcaactttgcggaaataagcaccatttctagagttgccagtattccagccatttctggcatagggatcatagcccagaaaggcagtcaattcagcttctaacaagttattaacagcctgttgtagctctttgcgcaataaatcatttattttgtctggattgaatagagcttgagcaaaatctttggtaaaatcattcatgaaggagttcttctttctgtatgtgtttttttgttcaaaccaatcatacgagaaaggaactcctttttctaatgtttaaagaaataaatttaaggaatcattcatccttacacaaaatattttacagtctcttaattcagatgaagtagattcttttttcgataaaaaagataatattgatagatatttgtatattggttgcccaacgtgctattattgtcgacaatattcagccactttaaatgaatttaataatctgattggtggtcaattatactatttaaatattgatgaaagtaaagataatgcagattatgcttttgataacttggaagtgccaggtactcccactgttatgcgaattaaaaacggtgaaattgctaacgcatgggtaggtggaggaaaaacagctactgagttgtatgattttctgaaaaatcaaggttaatacaaggagataaatatgttctttaaaaagaatcttaaagaagaagctgcatttaagagtagattgaatacagtgatttcagatcctcaagttaagaaaaatgccgaattggttgagttattacaagctgctattgcgaaagctgataagcatgagtcaattcaatcgattgcttctaatttgtctttgaaattgaaagaaaactttagtgaaaatgaactacctaaagctatagttgaacttcagctgaaactagaaagatatgcagcagttggtgctaacggtattgtaactggagtatttgattggtaaatcgacaggtactaaattcttgatcaaattatgtattttaacagaatatgatatgaacgttgccagtttctgacgttttcttagaaaacactactgttttggtagacttatatatgtaagttgatagaagtactaagtgaggcaggcttaaagatttatcggaggtgtctggaatggtaaagtttcaagaactaaaagaaaatcaattaagtcaagttttaggcggtacacatcacaagcgcggaggcggaaagtaccattactatggtaatggtgtatattgcaaccgatattattgtcatgataatttagcacaaatgtgggatagcgttggtcgtattatgtatactggatggcagaaggatggaccatttgcgcatcctttggtgtaaataatgattaagaaggatgagactttaaagttaaaaaatgaactagaaaaagttcgttttagtaaagatgtaattgataatccaaatttggtaagaattttggatagaacaattgatcaagcggaaaataatgattctgctttatatatcggttctagattatattatcaattgcaacagtacgaatttgctaaaaattttaatgctcctaaagttattcatgacttgcaggctacactagctggttatgcaggacaatcgagtagtagtatgacataggaaatagttgatggatttattatgaataagggttaatagcccttatttttttataaagtggttattatttcatataaaatataatattagggcgaaaatgatatcgattatttttagttttcatgaattacttgattaacccattgatagatttcttggtaatttagttcattgtcatctatttgagcgatctttaagatttgatttgctaaatcttgccaatcacaggttagttcataagaattgcgtcgtaaaaatagtaagaatgcaattgctgtagtccgtttatttgcatcttcaaaaacatgctttttaactaatttaattaataaaatcccagctttttcagcaaaagacggatataattcttgtccaaaactagtttgcttaggttgaacaactaaaaaatgaagggcttctgcatccctaacgtgaggtttttgtcccgttgcaccttctctttgaataacccttgcattgattactaaaatatccttttctgttagataattgatcttcattgactacttatcctttaagtactctaacatatcccagtaatcagaaattaagccatctatttcttttaaattttcagaattaggacggtctgattttttgatttttacttcaacaatatcgcctactttgagattttgctcttttacttccttagctgggatattgatagctaaggaagaaccatttttaacgacctttttatataaagtttcagccatatttttcaccttttctggcactataatacttatatacgtattatacatattgagcgataaatatgccaagtaataaatcaagatcatcaacaaaaaatcgatatcaaatctcacgaaatgatatcgattatttttatatgagcgcgattatttatttctcaatcaagctttcaaattcgttcaaccgtttttcaaaagtcttgaaggcatcttctaagtagtcaggcttagtcatgtctacgccagcacgcttcatgatctcagttgggtaatcacttgaaccagctttaaggaaaccaaggtaggcatccctctcagcaggcgttccatgaaccaccttgtttgctaatgccgttgcagccgcaaagccagtcgcatattggtacacatagaaattgtagtagaagtgtggaattcgtgaccattcaagggcaatatcgccgcctggttcaacgctatcgccgtaataatgctgattaatttgaccgtaaacgtcgtctaaagtgtcagcggtcagtggttctcccttagcatcggcttcgtgcaagaattgttcaaacacggcaaattgagtttgacggaataaagtgcctttaaatgaatcaaggtagtaatttaagataaaggcccgcgtcttaggatcggtaatgtggtctaagaaatattcggtcaaaatattttcattagtagttgaagcaatttcagccacaaagattggatagtcgccgtaaacgtaaggttgagtattgcgagtgtaccaggagtgaacggagtgaccagtttcgtggactaaagtataaagtgaatcgatgttatcttcccagttgagcaactcataaggatcggtatcataagcaccaccggagtaggcaccagttaccttgtttttagattctattgggtcgatgacacgattattaaaaatatagtcaacatgcttcaagtagtcttcaccaagtggagccaaagccttttttgctgtctcttttgcttcttcgaaattgtatgaaagagaaggtcttccggttagtggcacatacatgtcccacatttgcagatccttcaggcctaagatctttttacgtagcgcaacataacggtgaagtaagtctaggtgtgaatcaacttcctggattaaagtgtcataaactgctacgggtacgccattatcggctaaagcagcttcacgagctgaattatacttgtgcacacgtgcgttatagttgtgcttttttacaacgccagacaaagttgaagccaaggaattttggaactgtccataagtggcataaagtgtatcaaaagcaccttttctgacatcacgattttgggattggatcagcaaagaataaaggccatctgataattgttccatattgccgtcatcgtcttgaacgtaaccgtattccatgtcggagttggtcaaaacgttaaaggtattttcagaaacacttaaagcatccccagcatcggcgatcaatttttcttgctcagcaggtaatgtatgaggacgcttgttagtaattgtttcaagatagtgtgcgtaatcctttaatctaggttcagcttgcttaaattgctcaagcttatcactagggatactcaagatttcaggattaataaaacttgttgcagcctcaaactggttagccaaactttgtacccggctgacgtagccgagatagtgcgaattagaagtatcaacatcgctggacatggtagcgtaaacgtagatattttccacatcacgtttaacagctaagattttggttaagctctcgtacaggttcttgcctgatttagctagtgtaccttttaattcagcaagtttagccactttttcttgtgcagctgcataagcttgctcccattcatcgtcatttttaaaaatacgggttaagtcccatttaagctcttcagggacttcgtttctagttggaattgccatttttacctccataatatttcattttctatacatcttagcttgttgcgttatatttcgcaaaaaaataagttattattaattattagcagttttattttatcgagagattaaaagtgatacaaataaactaacttgtattaaattcgaagggaaacgatcaaaagaatggaccaaaatccaaaacgaagagaaggttatcgcgctcatcgttcatcgcttaatcttcatcggaatcgtgctttagccgcagatgcatcagcgctcaaatcaggtaacttttttgcccgcttgattggtgtggcagtattattaactgcttgttttggcatggcatgggctgctcacatgtattttaccgtccatagtgtgattgatggtaaaaacggcggcaacactgctacttcagctaaaattgccaataaacagccaatttctatcctagttctaggggttgaccaggggattgaaggtcgccatgatcgtggtaattccgatactatgattttagcaacagctaatccacaaaagaattctgcgacaatgacttcaattccacgtgatactttggcagatattaagggcgatccagaaaataaatacttcatgtttcgggtaaattctgcttatgaaatcggtggacatgaatcaagtatgaagactgtgtcatcaatgttaaatgtgccaattgattattatctagaagttaatatgaaggcgctaaaaagcctggttaacgcagttggtggtgtcgatgtccaagttccatttgacttctcgtatgactggtgtgatttccacaaaggcaagcagcatttaaatggacggcacgcggtggcttatgttcgaatgagaaaagaagacccacgtggtgactatggtcgtcagatgcggcaacgtcaggtgattgaggcaattgcacataaggcaatgtcggttaatacgcttggcaattaccgcaagctggtagatattttcaataaatatgtgaaaactaatctgacattcaatgatatgcttagtttggcgctcaattatcgtggctgcatgaatagcttaaagagtggctacattcaagggcatgatgcttggattgatggttcttcaattcaggtggcgtctactaaggaactacaaaagacgtcagataaaattcgtaagaacctgaatttgcaaacacaaactttgaacaatgaagaaacgcggcaaaatgaattgaatgatcagaacaatcacatcaagtgggatgatcccaatgctttcaccaattatcggatttatgatcaaaatcaagataagccggcaggtggttcgaattctggttatggttcaggtacgggtgaaagcacatcttcatctagttcttcagcgtcatcgagtagtagttggcattttaaatggtaaatatgaaaaagtatccgagatggatactttttttctgcggtaaaataaaactaagaggtgagaaaaatgatcggaacaattgtaaatacttgcgctttgctggttggtactacagttggctgcttggtaaagaaaggattgaataagcgttatgaagacgttttgttcatcgcaatgggactggcagcgttaggcatcggttgggagaatgtgactaacagcatgcctaaaagtcactatccagttttgttcattgttagcttggctttaggtggagtagtcggtaccgcgctcaatatcgctggtcgttttaatcacttagttgataaagcaggcaaatctaatttagctaaaggtctagctactgagattttgctttgctgtattggtgctttgtcaatcgtgggtcccgtgatggcggcagttaagggaaacaatactatgctatttaccaatgccatgctggatttagtaacttcgatggtctttggcgctagctttggttgggggatgctagcggtcgttccggttttattttgctggcaaggtagcatttacttggtagcaaaatttttgtcggctgatttttttacaggtccattagttactgaattgtctattgttggtggctttttgattgcttgctccggtttgtctttattaaaaattcgtgatgttaagactctgaatttcttgccatcattattggtgccggttatctttttcattattaaagatttgactgggtggttttagctgcgaatcatctaagagtaataatcttaccagtatttagatctttagattctattttaataatcttatctcctttaggaaatggatggatgaatttcaaatttagcaaagagattggaaccatataattttgattatttaataatgcaagagccaagatcgttttatttgtacgtaaagaatgatcgaattttaggtatgtaaaggctccacgtcctgttaatcttaagtgtggacctaacatttctttaagttgatttaaaacttgtaatttctgaaaagtagagccatcttttttaataagaacttttttagctgtacttttcgatctagagcatcattaaaaaattttcttggcccttcgatatatgaaattccacataaatgcataaagttatctcttcttgcagtgagttcaattttattatttttagtagtgtaaatgatggttttatttacaaaatgtttatcataaaaatcagcactattataaataatggatatgtaccgacgtaattgccccaattcttttaaattaactgatttaaataatttatagttcatctcttttcctccaagtaaaaaaggagtccacaaattgtgaactcctaaagtcggtttaattttggtgtctgccaccaactaagccattgcgtcttagatatgtaatatcaggtttaattttggtccctgctacccgtcaggcccttatgtcctgcattagaatcagattgaccatgagccgactactcattgatgcatatcaccttacacttttattatatttgagttcatttttatagtaaagtgttatgctcaaacacttgtttaaatattttatctaatattagctttgataacaagcgaacacaatatatttaccctcgaatcaaacgaaaaatttgtccgtcaggcccattaattagctgtggttcaattcccatcaatttaaaaccacaacgcttagccacatttgcacttttgtcattgccgacagcaactagcagatcaatatagtgtaggttaaactcactaaaagcatgctggcataacgccgttacgctcttcgtgacaataccatgcccttgatatttactcgacagccaatagccgatctcggcttttttatttggaatcaaattatgcaggtcgatcatgccacttggctgcttattgactaaaattgttaaaacgagtattgactgccgtttcattttggcttgaatttgtttaataaaattagcttcatcgtgtgcacttttcattttgtaggcccacggcagccacttacctaaattttcacggtcacaggcaacagcttgatataattctgctgcttgctcgacttgtggcaaaactagttgcacgtctaagtcattaatttgcaaatgaattggtgtgaaataataatgtttttcttgtttcattttccttttttctccgtgcaattttaattatgctaagtatacttaacttatgtaaaaaaatcagtgaaaacgtagaatcttgcaaatttggctgatttctgctaagttcgtaaagttactaagtctcaattagggaggaaaagattatgcaaaaggaagaaaaagaatcaatatttccagttatttacggtgtactctcagctgtgatttcttttattgccgtgatttttatttgtctacacagcttcaggatgaatttgcaattagcaatcatcacagcaagtgtttttgctatctttttcttcggcctatcctattttagaggacatgcatcagtcgaaattaagcgtattgtttataaatataagctgacagatcaggagctagctaagattacggggctaaaagcaagtgattttcctatttatcatgatcgtttgcaactgatcttacctaagcgctattggcctcgtgttcttgatgcactccaaaattatgaaaaagaacatgaatcagctaaataataggggatgaaaaatgagtttattaactgttaaagatttaagtcagagttttattgataaaactttatatgaagatgccaattttgtgcttaacaaagaagaccatatgggggttactggtcaaaatggtgttggcaagtcaacgttaatcaagattttaacgggtgaaattttgcccgatgatggtcaagtaacttggcaaaataaaattgatgttggttatttggaccagtatgctaaattggcacctggtgtgactatccgtggctttttgcggacggcttttgatcaattatttcaaaaagaaaaagagttgaatgatctgtatgccaaatatgccgaaaacggggacgaagccctgttagaaaaagccggcaaggtacagacttatttagaagaaaataatttttatgatattgatactgaaattgaacaagtcgcctcaggactaggactagctgatttaggctatgatcacgatgtttctaagttatctggtggtcagcgctctaaaataattttagcaaagttgttgttgcaaagcccagatgttctggttttagacgaaccgactaactatcttgatgtttcacatattgattggctggttgactatttgaacaattttgctggagcctttattgtcgttagtcatgattatgactttttgggccgaatcactaactgcattatcgatatcgattttggcacaattactcgttatacaggaacgttgaagcaagccttgcggcaaaaagcagccaaccgtgagacctacttgaaggcttatgctaaccagcaacgcaagattgctaagactgaggcctatattcgcaagaacaaggcgggtacacgtgctaagagtgctaagtcacgggaaaagcagctggcgcggatggatgttttgacaccgccaaaaaacaaccgcaaggcacgctttgaatttccatatgttgcgactgcttctaatttgttgctacagacgcaagatttggtcatcggttacgaccatgctttggtcaagtcagccttcaatttctctgttggtggggatgaaaaagtggcgattactggttttaacggaattggtaagactaccttgcttaagacattgttagggcaattaaagccaatttatggttcatatgagttatctgttactgcaaagttggcttacttcaagcaagatctaacctggcctaatagcaacatgactccactccaatatttacaagaagaatttgaacgcaaaaagccaaaggaattgcgacaagcgctggcacgcatgggcttaactgcacaacaagcaatgagtccactaaaggaactttctggtggggaacaggaaaaagtaaaattagctaagatgcagtttgaaccagctaatttgcttttccttgatgaacctactaatcacttggataacgataccaaggatgctttgagaaaagcgattgttaacttcccaggcggagtcattattgttagtcacgaacgtgactttttccgcggtgattgggtcgacaagaccatcgatattgaaactatgaactgaggctaaaactatgtctgagaagcgggatgtccaattttatcaagaagtaatggatatttgtttaactgcgggccgactaatgatcgaaggcgggagcgaaatgtatcgggtagaagatacaatgctcagaattgctcgcaatgccggaattgatgatccgcgtgtttttgcgacgccaacctgtgttttcatgagcttagatggtggcaagctaagtcagatgaaacaaattcgtgatcgcaacatcaatttggaattagtagaccgggttaatgacttgtcgcgccaatttgcagttaaaaaaatcactctttctgaattaaaagaaaagattgctttagtatcacaagcacctactttcccaatgtggctccaggtattgggagctgctgtattgtctgctaccttgatggttttgtttatggataattacgactgggttgatttcccaggtgctgccttagtaggggctgttggtttttggtcgtattatgagtttaaaaaatatactaagattcgttttttatcagagctaattgcagcaatggtcatggggatcttggcagtattattcaatcattttaatccacaaatgattactgataatattttgatcggcgctctgatgactttagtcccaggcttggcaattactaatgctttgcgagatctattcatgggagatttattatcagggattatgcgaatgtgcgaggctgtgttaaccgctttagctttaggcggtggagttgcacttgtacttaaattcataggagtataaaaatgccactttggttagaaattattattaatgtcattttttcttatgtagcttcggtgggttttgcattaactattaatgtaccgcatcgcgatcttcacctgtcaggagtcagtggcacagtgggctggatggcatattggacttgctttaatttgggatttgggcgaatgatttcaaatttaattggcgcctttttgataggtattttgggcttgtgttttgcacgcattaaaaaaagtccagtgacggtctttaatattcctgccttagtaccgttagtcccgggcgtgcctgcttatcaagcagtacgtgctttagttgtgggggattatagtcaaggagagaatttgcttctacgagtagcaattgttactggtgctattgctttaggtttcatgttatcgactatgtgtactgaagttttttataaatttaaatatcgtcattttaaaagtgctagactgtacatcaaacataaaaaatagtacaattactgactgacgagtcgattaatgaacgcgagatgcgtatatttatgagatagaggacatccgccttaagtggcaagcacgggaagtgctgatgttggacgcactgatgtgaacagtttaaacgtccacatatgctttgagcatgtgccttgagttaaaaggacaagccttcgtggcttgcccttttttgttatttgatgtaaagtgcctggcgtccttgttggtcataactcaattctaagttatgccaattaaccggttggtttttaataccgtaaggattattaacatagacaagcttcttttgcttgttgtatcccgtgatcacgcaggcatgtgatgacggtgtaacgttgactttaccagtattggtttcccatgtttgcatattgttaacatgattaaaagtggttgtggtaatgatcagcacgggatgcccatcggagattaacttgagaatcgctaaaaaattgctgccagaggcatcttctatgtggctggtatatttacgtgcaacgtcaaataaaggcccatgataaacgcaccagccagcattagcgacagacatatggccgacaaagccttgattggggttgccgcgatatttaccgttgtcggtgaaagaatcaacatgagcaatattatcggcgagatcatatttgttaaccttaatgtcatagtaattcagtaacattgataggctagtaacctcgcagccgttgggtagatcgggcagttgattttctagcgggacattgagccgctgttcttccttcattgtcatccaattaatttcattatcgattttatttttgttaaaaaggtaaatcaatcctataatgagaattaacgtaatgggaatgagtaaaaataaatacttaagatcaaatttttgctttttcatagtgtcattttaacaaataaaaagctaaaaatactgaattgaatccttaaaaaggatgacaaaaaatttttttgtagtattttgtaattataaccaatgaaaaaggaaagtttattttggaaattaatttaaaagatctcaacgaaaaaattgaaaatcaagattatattcaagatcttgaaacagttaaatatgccgacattagcaagtcgaagagcaaaatcaagccgtatgctgaaaagatggtcaaggaagttatcgctgcttttaagcataattcattgatccaaacgcaactagcagtgacgggtcagcggccggctacttttgccttggagacaaatattatcaatttgccttatagcaattacaaacgagttgctaacttctttgaagagggtaaggaatatcctttaaatgtttactttgaaacgcgctctgaatacgttaatgtttcaggctttagaattgatcaattagccagtgaagtagagatcgaacaagatccagcgaagattgttgatcaactggtggaggcaattattgaaaagctaaccacaatacgtgaatataagaagcctgaaaaaaaggaagcagaaaagaaaaccgctactaaaaaggcaaccaagaaaactactaagaagtaaaaaaagacgcaaccgaattttcgattgcgtcttttgtaattatttaatttctttaaacttagtcagcgagtgatcgttagtgtagaagaagaagtcttcaagcactgcattcttgatgacccctttttcaataatagggttgattgaatcagaagtgtcaggatacttggctgaaaaacctaggttgaggtaggccttgttgacactgtagtagagatagtgcgtaacatcatcgatccagtcagtgcccttgtacattaactcaatgtgcttcttctcattatcaattagcacatcgtacaagttatcgatccattcttttagctctgcttgctcagttttacctaatttttggtagcctaagcggaacttgtaaccaggataaatcccactaaatgaagtgccacgtaaagctaacttaacaatttcagctgttcgtaccattttgccttgtccgaataaataaagcggagcgtagaaggcagaatgatagagagctgtctctaggataacgttagctaccttcttttgtagtgcatccccgccttggtagattttattcaaaatccgaatcttcttttgcaggtaaggattgtcatcagcccagttaataacgtcttttgctatatttgagtccgtcaactcgttgataacgtagctgtagcctttattggcaatagattccaaatattgcaaggcattcagcacagctgcttcctctggtgtgatggcatctaccttaatttgctctagcccatttttcatttggagtccagatgaaaaagatagtgctccgaatgcgtgaagcaaggcatcttgcaccggcttgtctaattgtaaaaattcttttttatcttctctaactggaacattacggggttcccagataatatcattcaggcgggaccaagcagatttgtcaacccggtcctccatgtcattccagttaattgctttgtaatatttttcagtcatatttaatctctaaaatcactcaaaaagctgatattcccacgtaattccttaggcttttggacttgcttagtactctcaccagcagaaagatcgtgtacgatttttcgtacatttttgacatcttggttagtaccactaaattccaaaagatacaaaataggcactttcaatgttgccgtgatctttttggcagtttgagcaaagaggtcgttaaagtttcggttgccacaaccgataatccctataatattttttttgttatctttatacgttaaaaaatcaacgactgaatccatcatgaagtcctgatgtgagggtacgattaagatataagattttcccatatcatacttagggttggcatcgtcgatttgatgggccgaaagttgagttttcttaataaaacgttccgtttgcccagtaattgaataaaaagctattgctaccataatgttccctaataaatctaatgtactagtaagatcttctcactatttaactaagtattcaattattatcctattcaaattttgctttttttaccatataattgaaaaaaaggaggattaaatggttagctgaaatatagaatttaatggcaatatagaaaaagatacaggtaatttgttcagaaaggcaaaacatagaagcaaattaactgctgctaaaaatttaatattttgttcgcttgtttttgttacatcctttgctaaacttatgtttgcattggaggtgaaacaaatgatcaaaactcaggtagtcgaattaaggccaaataagataatgcaaagagaacttgaacgtctttgtaactatcgcagatactgctggaatctagctttagcaacctggcaagacatgtatgaagcttggactttagacaaggataataatcctagtcctaatgagcatcgagtgtgggatgaattagtcaataacaaggctgattggcaatttgctttgtctgctcgctgtctgcaattagcagtcaaggatctggctaatgcttggaagaacttctttgacaagacccagcctgattggggcaagccgcatttcaaatctaagaaagctccacgtcaaggctttaaaactgatcgcgccaagataattaatggcaagcttagattagataagcctagagggattaaatcttggtttgatattccagcatacgaggcattaaagatggaagaggttaaaattgccagcatctttagagaaagaggacattattacgctgccctttcctatgaagaagaggctggactaaaggctaaaactggcaaaaagaccgccatcgatgtcaacgttgggcatttcaactacactgaaggcaagattaatgttttgccagcaaaactacagaaactgtacaagcgaatcaagcattatcaaagagtattgtctaaaaagagaagagttaacggtaaatcggcaagccaaagcaataattacctgcaagtgagaaccaagcttcagcgtgattatcgcaaagcagccaatattcagaatgatcttttgcaaaaatttaccactgagcatgtaaacaattatgaccaaatcgtcattgaagacttgaatgtcaaacaaatgatgatgacccatgtagcctccaaaggcatgcaaaggtcactatttggcaagtttagacaagtcttgacttacaagtgtgaatggtatggcaaagaattaattctagctgataaaacatatccatcaacacaaagatgtgccaattgtggctatgtcaaaactggtgcagacaaaattactctgcagggcaataaaaaacatggcaccaagcataatgaatacatttgttatgaatgtggctatagcaatgatcgtgatgacaatgcagtattaaatttactagcgttaacaaaataaaaacaatgggctggctaagcccttaagctgcaagagttagtcaatgcgattactccccagatggaatatcggaatactgatgaagacagcagtaaataagacaaagaaaggaaaatatatttctttctgacatgtagaaatatgaaaacttctgcatgtttctatgttttatatagcagggcgagatatgttcagctggaatatcattgggatcctgatttgggttgccatcattctttatttagttttcatcgtccagaacatccgtcaaagacggattaagatgattatcaaacagcataaacgctttagttggccgaatatggctcttaatattgtggaaattgtagtacttttattagctgcaggttggatgtttaatcagacttttatggacaatccagacctggaagatgcaaaccgcattacttcaagcgtgaagtatgagccactgataatgcgtacaggtgcgggaaattcaagctatgtaacgattaattctgctaagaagagatatggctcacaaacttatactttttatcgcgatggcagcaaggtcacgattggtagtgactatgcttcgattgcttatggtaacactgcgcttgacgtgaatgcggagaagattccttatgtaaaaaaggaattggctaaaatggataaaaagtatcaacgtgcttacgtggcaatttatacggctaagtacaagcggaattggcaaaatggaatcgggatgcatgcaggtcatttagcaactcggtactacttaattcgggtgccagattcaagctttattaagcaagaaaaataatgtttaaaaactaagaaaaagttaggcaagcaactacctaactttttttatgtttaattttcttttctggttacgctagctaacaagctgccttcaacgaaagccaggatgaagctagctgttaagaagtccattacgttacctgacgagaatgctgcgaaaatcataaaggcgattgaaagcaacattgagctgatcaaataagtccgcttttctttgttcattagccacttaattaaagcgtagagcaggataatgacataaggcccaatgaacaacagcatgccgatccaaccaagtgaataaatttgactagtgaaatcacgttcaaggttgaaaatgttggtttctcgtgtgtaagaaatgcccaggaacttgtcgagtcgattattgttagtcttcacaacttgatcaagcatcgctttttctacatgtcgattttgcattctagcggtgcctggctcgttcatgattttgagccaaaattcaggatcgtatttataagggtagcttttaaaaacaaacttcttatttaaggcgtaatcttgataatgattgccgatgaaattcgttaaaaattccttgcgctgtttaccttgaggatatttttttaagccagcatttaattctcgcttggcctgtgtcaaagaatcatcggattgctgagccaaatatttttcataattatagcgctggattgctggaccaaaggggatgatggcaaaggtgcccgcttcgattaaaagcgccacgataatggctttgccgtttttgttaacatccttaacaataaataagtggaaaacatacagcaaaatactgataatcacgccaccgattaaaccgatgagggccactttggttcctaactcgatcatcgctaaagcttgaactacgttcaaagtgacgattttccagttaaaacgactgaacatgaagtaaagcatcagaggcaccagcataaagagtacggctgataccatgttggcaaaattgaagaagcctttggaggccatatgggagtaaccgatattggggttaacaaaccattcaaaaatattagcgctaatcgggcctgtctcgtagcttctaagcgaaatgacaaaaagattggtaatgacaattgtaaatgaaaaaagtccgctgatgccttcgataacgtgtctgaattgctcctgactgaaattcaattcttttgtaaaaaagatcaccatcagaggtaaaagcattctaatgagataaaaaatttcgcttacggttgaataattgtagtcattaggattaatgctgttaaagtttttgacgtggattaagtgaataatcgaatacaaaattagtagggctaaatatagaattaaccacttgtcttgccctaatttttgccaattttgcttttgactgaaaaacatacagaaaatcacaaaaacagctaaaattcggataatcgtaggtagagtaaatggtaaaacttccgctaatttaccgttgtagaaccaataaaggtctaaaaagggctggattaaaataaaccaaaataaaacagttcgcgttttttctttcataaaatatttcctctcgtatcgatgtcctaattttaggcaaaaaaatagctcgcgtaaacattgcgcgggctatttttgtcaaattttacttcttgtctgcttcttttttatcgtcgttcttcttggcaattttttcaatcttaacttcattagttgaagcagtcttgctgttcttggcagcgcgagcagtctttaaattcttgaagttaactacgatcttattgttcaagtcgctgatagcagtggtgtcaacgggatcgtatgaagtaattgcaagcaatgcggaattttcgtagatcttttcaactttgccttggaatggcttcttaagttcttcttctgacttggcaccaacgattgcaccaacttttacgtctgcttttttcattatgtgtatcttccttccgagaaaaagtcttagtcttttataacacaagaatgctattataaaaaagcaacattttcaagtggggagaatcaggttttgaaaaaaataattcttattgcaggacctagtggtgctggcaagacgactgtttcagaatatttaactgaaaaatatggtattccacgcgtattaacgcataccacgcggccgatgcgatcaggcgaggagcagaatgtttcttatcattttgaaaccgatgaaacttttgcccagctgcacttttttgagcatattaagtacggctcttatcaatatggctcaagtcgagaagctttgaatctggcctggaaaaaaagtgatctggtttcattaattgtcgatatcaagggcatttattcctacattaaacagctaggtgacaaggcttattttctttatgttacaacttctactaaagaagagttaaaacagcgccttttaaagcggggcgatgatccatccaagattaaagaaagacttagcggcagtgaattaaatgctttacctgaagatttgaagcaatacgctcatatcttagttaacgacaatttaacagaaactaaaaacgcgctcgatgcccttgtagcaaagcttcgctagcattttgcttctcctttttttacataaaatctgtttttttaacatgtttcttaacgcgatggtagctcttttgaaacattcgtgtaacattcagtcggtattatataaaccgtcaactgatttaagaaatcaaaaacaaatttagtaatttttagaggagacaattaattttgaattttagacgtactttagtaaaatacaccgcagctttatcagtattctttgccggtatttcaatgatcaatgttccagctgttcacgctgatgatgtttcaagcactactatcaatactaacaactcaatttcagatcttgaaactaccaatcctgattcaagttcagttaagaaggaatcagctactactaaggagcgtaatgcggttgttaagcttgttaagaagcaaatcggcaagccttacatttacggtgctgcaggtcctagcggttttgactgctcaggtttaactagctacgtttacaagaatgcaattaacaaaattttgccaagaactacttacggtcaaattactcttggtaagaccatttcagtttcaactaagaagcttaagaagggtgacttattattctggggtaactaccatgtaggtatctacgtaggtaacggtaagtttgttcacgctccagctcctggtcaaaatgttaagcaacaaaccttagcttcattttacccatcatcagctaagcgtgtaatcgactaattgcgttagtcttcctaaaaataagatatctagttaagatagttagggaaatctccctagctatttttctttttgacggaaacgtaatatttattaaatcagtattacttttgtaacactactgtaacattggggcattattatagattttgttaaatacattaaagaaatttaaagatttttcgatgaattaatattttcgttaccagcttaagtaataaattctaagaatgcttatagatatagtgaaaacatacaggagaatttgatgaatattaagagcaatttcgtaaaagttaccgcagctgctgcattaactctgaccggtgtagctgcagtaaatgtcatcaagccagattcaactaatgctactgttcaagctgctactaccaaagtaaagattaactacattgcaggttatggaattaacatatgggacaactacaatggtggccactttactggtcaacgtgctcaacatggtactacttggaatgtttttgacaccaagactgataagaagggccgtacatggtaccaaattggtgataaccaatggattttagctcaatatactgttgatgctagttcagataaggctcaagcagttaagaaagctaaaaaggctaagaagtcagttcaagcaactggtgatgcttcagcagttattactttggcttcagcacaattaggcaagtcctatgtttggggtggtacaggaactaacggttttgactgttcaggtttggtacaatatgtttactctaacgctgctggcgtgaagttgggtagaactacttatgatcaagttaagcaaggatcaaccgtttctatggataatcttcaaccgggtgatttgcttttctggggtagtgcaagtgctccatatcacgtaggtatctatgttggtaacaaccaatacatccacgctgctacaccaggtcaaggcgtaatcaagcaaactttgagttcatacttctacccaagtgttgctaagcgtgttttaaattaagatagtaagtaatgaagacggattccagtgatccgtcttttttgtaatattgtaatgttctaatttgcttcttgaggtaggacatgcaataatgaaggcgttacatagtaagagtgggtaattttaggtgaaaagttttcacctgtttcgctaccaaggggattcaattatgaaacataatttttttaaagtgggagcggctgcagccctgaccgttacgggtgtttccgcaatcacatcaatgaaaactgttcgtgcagctaattttactgcgattaagcaagttaagattagctatttaccaggtaagagcctgaatatttggaccaactatgagaatggtcaattcatgggctaccgtgctaaggacggcacggtctggaatgtagctgagactgcactcgataagaagggcaacttgtggtacaaggttggaacgcgtgaatggattgaagcgcgttataccgtagatgttactgctggagaaaaagcagaagtatcgcaagcaccaactgttaagaaaacggaagctaagcagacaaagactactgttaataagaagacagcggcagtagctactaaaacggctactcagaagaaggctgaaaagatagctaaggtgaagaaggctaagcaaattgttaatacggcaatcaagaagactagccaaaatactaaccaaacttcttcaacgcaagctactagtaaggccgcttcaattgttgcgctagctaaacaacagataggtaagaactatgtctggggtgcagaaggtccggattcatttgactgttctggcttagtacaatatgtttaccaaaaagcggctggcgtgaacttaccaagaacaacttatgatcaagttaaggttggtcaaactgtttcattgaacaacttgcagccaggtgacttagtcttctggggttcaacgacagctccataccacgttgcaatttatgtaggaaacaatcaatatgtaaatgcagcaacaccagagcaaggcactattttgcaaacggtatcgagttactttacaccatcaattgctaagagagtactatagagaagtaatttggaatacttttaggcaggcgattaatgcgcttgcttttttgtattgataaaagttttccctagactgaaaaattctactttttttgccatagttttcagtgtggagaaaattatagtaaaaattaaagaaggattaaaatgacgcccatcaagaccgtttaagcagagccatgtccagaaattcaacgcagtatactcacctttgcagcgagtatattaagcaagcggtaaatgcgttcttaggacaaatgatgtcagttgaatagatttgacatcatgacctaatattttctgacattattgattttctaactgaatagctagtagcggtataattaaagccgatattaattagaaggggtggattgaatggcgaagagacaccaatatctttggtgtttggttgaattgcctaacggcaaacgcgaatggtactgcatttctaaggtattgcgcaaggccttactttgggagaaaaattatctgcataatcgatactggcgcaatactttaattggtagctacctcaatgttgctcgcacgcgttatcatcatgatcgggcaattattacagtaggaagggtaatccgagtgaaaattttgtattatcctactcaggattggcattggacacgcaatcaatttatcgcggcgggacaattggataactttgccaccgcctataattatatgaagcacaattatgcttggtacaacaagctattgattcatcatgcgttacgtcattggcgtagaataagcacttctaaacattgcaataaattctaaatcatattaaaataataaaagaaaaggagctagcgagtgtcggtcgctaactccaatcgtaacttaagatgactgttgtttcggctaatccttgtgattagctttttttgttatcgcatacgcaatagcccaagcaatcatttgtaagcctacttctccagtctacccaattatgcatgcttccacctccgtaacttaaaaaatcttgaggggtgtgtagccatgctaaaattactaagtcttagcggtagctaaccgctgcaatagacctgagtattattttacatgaagattgttgaacagactacaatatttgttactatctaaaacggctcaagcaggatgtacaactgcttgagccgttttgcatatcaacgtatttcattttcgatgctttacaatctgtttatttttcaatgtgctattttgcctgaaaaatttgaaactgtagctataatgtttgccgatttgcacacggtacttgtgcgtgctgatcaacttggttttgccaggtcggtaagtgattgtcgttgtgtagccgtcaccataaagagcagtgccgaagttgcgcacctgcgtcgcttgccgctttttcttggtggtcaaatccgtgatgtaaattttcggctgaccagaaattcgctcggttgttgagtaagaccatggcgttttaccaccaactaattcgtaaggaaaaacgccggcagctggataaacgattcggctttttacaggctggcgcaaaatatcatcggcaaatagtccatgttcaacagaatacaagacgttgttttcggtgccataagctgcgccgattcccattcgggtggctcgcgtcgagaggatcatgccgcggtgaccgatgttgccattacctgcaatattattatcttcacgtatcagatcggtaacgatctcgccagccgtggttccgctagttgattctgaaaaattgatattgcccaatgtagtattttccgctgtatcccagtcagtatcactgatatagccaggcttgacgtaaccttgtaaaccatgggctcgcagattttgctccgcgttaactgaagctagcgctgcagcaccaagttgtgcgttaacgttatcattagcataattggcgtcatcaggcagtccaaccaatgagcggtaataattgacataagccattgaagttttgatgtaatcagggtcaagcactcctgctgaaaaaggaataccaaaatttggctgcacggtaaagagcgtagtctgattgtaattcttctggctcaaacgatgatagcttttttgaaaagtgcgcaccttttttgactcactagcactatatttagcagccattacaggcgtgttagtaggaactaacaaaaatgtgagggcaaaaaggaacagcagattatgttttttcatattttttcctaatcgagttaggccaaatattgacgaaagcgtccttggtcgtcgggcgcgatgttcgcttcgatgtggacgccatcgtcttggtagtcttcacgtaaaacttgggcgcgatcatgcaggtaagccagttccttgcctgcgcttagtggcaggatcaagtcaaactttttatagttggcaaaaacgcgcttggtgatcaagttggccagtagtttgatcgattttggatcgatggcggaataaagaatgtcgtcgccttcgatctgtgggtaattgcgatcagtcttatcagccttgttgtaggcggtaatcatcggaatttccttaacgccaatttcatccaaaacgttctgtgttgtccgaatcatttggaccatgttcgggtcagaggcgtcaacaacgttgattaataaatcagcatcacgcgtttcttgcagggtagccttgaaggattcaaccaagttgtggggcagtttagaaatgaaaccgacagtgtcagacagaatgaagctaaagttgtctttcaagttgatccgccgcacggaagtatctagcgtagcaaaaagcatgtttttaacgaagacttccttgtcggctccttctttagaaaattcacgcaatagtccgttcattgtggttgatttaccggcattggtgtagccaacgagagcgactttagggatgcgactttggttgcgtcgtgccgctttgatttcttcctggccggcaacagccttcaattccttcttgatagccgaaatttgcttgccaattgtccgccggttcaattctagtttactttcaccggcaccacggttagcgaagccaccaccacgctgctggtccaagttgttctcggagggatggagacgcggcaattcatattgtaaacgtgccagttgcacttgtaatttagcttgtttagttcgagcgcggctggcaaaaatttccagaattaattccgtacggtcaataactcgcattttggttaatttttctaagttgcgaatttgtacgggagtcaatttgtcattaaggactaaaacttttgcttttaagccttgagccatagttctaatttcattgattttgccgacaccgaagtaagttccggcgacaattgattctgcattttgaaagctttgcccaactacttccatgttgttggcttcagtcaagttggccagctcggtcatgtagtagtcgaagttttggtcgtttaagtttacgcccgcgatataagcttttgtctttttaggttgattatcaatcataaaaacacctcgttatttgctgttaagtttattgtattacagatgcttataataaggaaagaagtggatcgcatgtagaagaataatctttaccacgagtcaaattttaagtatacttttaataaagaaagagattatgaatgaggtgagaattatgtttaccgatattcaattagtgtttaaaaaattatcgaaaaatgtagctatgccttatgtcaaattattaaacaagttgatatattctagtaatagtaatgctgaggaaaaagctattgccagtgattggcaaaggataggggacgacttaagaaagggaataatatcttatggcagatcaaaagccaagtaaaaagctagaaaatgatataaagaaaaagtcagataaagattcgctagatgaatagattcttgatcaaattcaaaaatctgagatgcctaaagaaaccaaaaaagaaataatggcttatcttgagatgcatagtggaccaattccgcttcctgatattcttgagggataccaaaaattgtatccgaatgctgctaaggaaataatttaataatggtgttgaagaaagtaggcatagacggagattagaagttgctagtcaaaaaagaagaggttggctcgcatggacatctctgatagtagtatcaatagtaacaattctatgtatttgtatttctgcttttttggtgatgcaaaggcattcggtggctggtagtatttttggtggaataggtgtgtttacactatttggtggagtagttggaaatatagatgatctaactaaaaatgatgatttaactaactcaagtgatcatcataacaattaggataaagtaggcggtttatgtggccgtctacttttttgttttatagttcgtgatactacttcaacttcatttggtttaccctgaaaatatgtttcaaattctttgattgattcttcaatacttaacatgctatccaacttctatttaatgtacttcttaatactttttggttatttaggtcttactaaatatggtacagtgtgagtacaatttaaggcaaggcgatagtaagatgaaaaataattccgtttaaactcaatctagcagcaatgcattccatttttcgagggatgcattttttattacatgttagacatctaccaaaatatattatttcagcaacccaaaacagcaataaaacgagcctccttttaagtatttgccgcatgtaaaccttttaagggtggtcaaaatgggttcttgagtatataataataacgattataagattaagaggattagaatggaaaataacgcagaatcaagtaataaaccgatacattgtcatcgccatcatcaccaccgtcgtcaccgtaagttctggcgcggtttttggattattattggcgtgatcattgtagtcggtctttttgtttgcgggatgatctacaaaaatttgcgtgatacgacgcagaatatgtacactcccgttgctaagactaccaagagtaataaaggacgtactcttgataatttactgaatgagaaaaagccaattaatatcctgttattgggtacagatactggtgccatgggtcgtcactggaagggtagaactgataccatcatgatgatgtcaatcaaccctaagactaatagtacaagcattgtttcaattccacgtgactcaaatgcaatcttcccagattacccacaatatggtgtaaccaagatcaactcagcttatacattgggtggagttagtgaaactattaagacacttgataaatattacagtgttccaattgacggctacatcatgatcaatatgggtggtttgaagaaggcaattgaccaagttggggggattgatgtaacttctccattaactttcaacaatatgggttatagctttgtcaaaggccagacttatcacatgaatggtaaaaaggctttagcatttgcccaacttcgtcatggtgaccctcgtcaggattatggtagacaagagcgtgaccgcttggtaattatggccttgcttaagaagtctgtttcaccttcaactttgcttaattcaagtttcttgaattccatttctagcgagatgcagactgacttgactatgaatcaaatgtacaagattgctatggattatagaaaagccactaacaatctttctcaagatcatgctcagggtgtaagtaaagaaacgcaaaaccctaagtttggcactatggaaattgaagtggtaagtagagaagagcgtcaacgagtttctgataagatcagaacggcgctagaattgccacatgttaaggtagctgctaacaaggctagctatattatgaatcgttaatcgttattaaaggaaaaggtaaatggaacaagagcaaaagcaaactgaaaatacaattgatcttactcaattgctacaaatttgccgtcgccacatctgggcactgattatctggagtgttggtttggctttagtcggctggggcgtcgctaattttattatttcaccaaagtatacttctaatgcacagatcttggttaaccaaaaggctaacaagaatgacccgaatgcggcatataatactcaacaagccaacatgcaaatggttactacctataaggatattgtaactagtcatgttattttgcaagatgcttctaatcgtttagctaacccagttagagtggttaaaaaggctaaacctgctaagtacaagactaatgcagagggtcgccgagtattagtaagaaaggctcaaccagaagtagttgaacgtagcggtaagagttacagcgtttctactagcgaattagccaagagcgtttcagttaatactcaacaacaatcacaggtcttctcaatttctgctactgcagatacacctgaaaaggcaaaggttgaagctaacgctgtagcgcgttcattcagagatcaaattcctaacatcatgaacattaacaacgttacgatcgttgcgccagcaactgatggtaatcaatcatcacctaatgtgaaactctttaccttggctggctttgttattggcttggttttaagtttcgcagtagtcttaattcgtgaaatgtccgacactacagttaaggatgatgcattcttgactgataacttaggtttagttgacttaggtcaagtttcacacttccatgtgtcatcatcatttgtcattagaaaaaagaataagaattctaatggccctaagcgtagaagccgtcgagtataggagaggagaagtaaatggcattatttagaaaaaagcgtggtaccgacgatacaattaagcatggtgccaaattaatcacagttgctgatcctcgtagtgcggtatctgaacaattcagaactatccggactaacatcaactttatggcagttgatgaagaaattagtaccttagcttttacttcagctaacatcagtgaaggtaagtcaaccgttacggccaacgtagcgatcacctatgcacaagcaggtcgcaagaccttgctaatcgatgccgacttgcgtcgtccaactttgcacagtacgttcaacgttaagaacaatactggtttgacaactgttcttacttcagaagctgacgcaatcaatttaaatgatgtggttgaagaaagtggaattgataacttgtcaatcttgacttctggtccgattccaccaaacccagctgaattgattggttcacgcagaatggaaaccttcattgaattggttaagtcacattatgatatggttatcattgacttagctcctgttcttgaagtatccgatacgcaagagttggctagtcaccttgacggcgtagtcttagtagtacgtcaaggcgttacgcaaaaggctgggattactagagcagtgcaaatgttaaaatttgccaaagctcggattctaggctacgtcatgaacgacattagagctgaaaacggtggctatggttacggctacgggtatggctatggttatggatatggcgctgagaagaaaaagggcctgttcggtagaaaaaagagtgacgatcaataatggttttagtcgatattcactgccacatcttgcctggcattgatgatggctcaaaaaattgggacacttcaattaagttagccaaggctgcggtcaaagatggcgtaacgcatgcaatttgtacgccgcatacactgaatggtcgttacactaaccataaggatgatatcgtctggctgactgatctctaccaacagaagctagatgaggccaaggtgccgttgacggttttcccagggcaggaagttcgcttgtcgggtgacttaattgatgcgcttgataacgatgatatcctgttctgcgatgaagacggtacttatatgctgttggaatttccaagtgaggacgtgccaacttatgcgcaagacacgatcttcaagatcatgcagcgcggggtgacgccgattatcgtacacccagagcgcaatagtcgcatcttgaaggaaccggaaattttgcaagggatgctggaacaaggctgcttggtgcaaattactgctagctcttatacaggaatctttggcaagaaaatcgaagagatgtcgcgtaagttgattgcgacggggcagggatgcacctttgctagcgacgcacacgacttgccaagacggcagtatcaattgagtgaagcttataaaaagatgagtcaagaattcagtcaagatctagctcagcagtggcaagataatgctagaagtatcatcaatggcgacccagttcagatggattggcacccattgaagcagaagaaaaagttctggttattttaatgcttggtgcaaatatgcaagtttgcttctaagttgcgttaaacgtgataagattaataagagagtgtattcaaatagactaaatcaaacagagggtaagaggagtatgataaactacaagttaatcctgcaaaagttaacggacgaccagtgtatcacacgattaaggggatatttgatatactagctagcgcacttgggttaattttactatctccgttatttttatttttgataataaaaataagacatgaagatggtggtcctgcattttattctcaagaacgaatcggtaaagatgagaagccgttcaagatgtggaagttccgttcaatggtcgttaacgctgatcaaatgcttgatgaactagaagatcagaacgaaattgacggcgcaatgttcaagatcaaggacgatccaagaattacgaagatcggacatacaattcgcaagtatagtcttgatgaattgccacaactgtggaatgtcttgatcggcgatatgtcactagtcggtccacggccccctctaccctctgaagtagctgagtatactgactacgataagcaacgtttgctcgttatgccaggttgtactggcttgtggcaggtaacacgccgtagtgaagctgactttgacgaaatggtttggcttgatattgtgtatatcaaccattccggtttgtgggaagatttgaagttgattgttaagacaattggggtggttattcatcctaatggagcgtattgatcaggagaagagtctttgaaaatagaaattttggttgctgcgcataaagagtttcctatgcccaaaaaggaaggatatttaccagtattagtaggcgcagtaaagaattataaaccaggtatttcctatcagcgtgatgatgatggtgaaaatatatcctctaaaaatcctaattacaatgaactaactgctgtttattgggcttggaagaatttaaaagatgttgacgctattggattagttcactatagaagattactctttgagaaaagaccatattctttagataatgtaattagtattgagaaagtaaatcagcttttacaaaaatatgatgtaattttacctaaaaaaagaaattattatattgaaactaattattcacattacattcatgcacatcataaagagcctttggatgaagcaagaaaggtaattgctgaagtatatccaaattatcttcctgcttttgataaagttatgaaaaagcgtggggctcatatgtttaatatgtttattatgaaaaggaatgcatttgaatcatattgtagcttcatgtttgatgttctaagtaagctagaaaatagcattaatatttctgaatattctgtgcaagaagcgagagtatttggatatatttctgagttgttaatggatgtttggcttggtaccaattcatttacttatgtagaagttccttggggacaaattggtggaaagaatactttaaagaaaggcttttctttaattaaacgaaaaataggtataaaaacgaaaacacatttttaatttggtatgagaaaaaatatgagatggaaaacagtaaaactgtatgaatattcaatttaccttatagtttttttatatttaggttttatcaacttttttaaagacttaaattctttaagtattagtataggtgttgttatatctgttttactgtattttatttatgtaaatcaaaaaaatagagaaataaaagtttcaagatatgtatctatttatatgagactgtaaaatagtttgtgtaaggatgaatgattccttaaatttatttctttaaacattagaaaaaggagttcctttctcgtatgattggtttgaacaaaaaaaacacatacagaaagaagaactccttcatgaatgattttaccaaagattttgctcaagctctattcaatccagacaaaataaatgatttattgcgcaaagaactacaacaggctgttaataacttgctagaagctgaattgactgcctttctgggctatgatccctatgccagaaatggctggaatactggcaactctagaaatggtgcttatttccgcaaagttgatacgcaatttggcccaattgaagtgcaagtgcctcgggatcgcaacggtcaatttcatcagcacacgctgcctgactacaagcagcactcggatatcttggaaagcatgattatcaagctttactccaagggcgtgaccaccagggaaatagccgatctaattgaaaagatgtatggcagccattacagtccagctcaggtatcaaatatttccaagcagatgattccaaaggttgaggcttaccacaaacgcaagctaagcgacaagtttttctgcgtctatttggatgcgacataccttcctttgcgccgagaaacgtttgagcgtgaagcagtctatattgccattggcattaaacctaatggacataaggaagtcattgactactgcattgctcctagtgagaacattgaagtctggacagagatgcttcaaaacatgaagtccagaggcttgaagcaagttgaactctttctttctgatggtgttgttggcatgaaaacagccttggccaggacttatcctaaagctcattttcaacgctgtttggttcatgtcatgcgcaatatctgcgctaaagtacgcgtcgacgatcgtgaaaagatcatgaacgaattcaaacaggtgcatcaacagacaaacaaagaagaagccacagctgtcctgcatgacttctataccaaatggggcaaggtttacagccatgttatcagaagcttgaaagacatagaaccagatctgctggtcttttataactatcccaagcagatcagagcttcaatttattcgactaacatgattgaatcatttaacaatgtgatcaagcgcaaagctaagcctaaggcagagtttccaactgaacagtcgcttgatgcttttattggtattcaggcaatgagctacaatgaccgttatttcaatcgaattcataaaggctttggtcaggttcaggacaccttagaatcctactttgattaaataaataattaaaaaatcaatttacgagaaagaactatttacacaaaagatttgacagtttcatttatataggcgtttttatttttatgtttgggctacagttatataggctaaatagtttttccttatctgggtacacaattaaagatgctttaattcataatagatattatgcgtatatgttgttaacgtttccgatgacggaggtgctagcgactgctaaacgaagaatgaaatttattaataatacgcgtggtgctagttaaatcgttctagacaataagccaaattataagctaaaattgcaatttccaaccggctttgaaagcctatcagactacgtgctcgattgttctcggcattgtaataggtcagaagcgaaaagtcgctttcaattgttctgcgaatagccatcaattgatgatcattgtgctttttagctcctgtcatatttttacgatatggtgtccaaagttcataacccatttgttttagctgttgatgcagttctttgcctaaatagccttcgtcgccaagaagatagtaattagatggatgggtattttccagcagttcaactgtctccctggcatcatgaactgatgcttttgttacgacataatcaagaatgtaaccgtcatcgctaacaatgacatgaactttgaaaccatagaagtaaattttcttggtggccttataaccaatgttggcataaccgcgaaaaattttagcacgatagttgcgaattggttggcaaacaggtaccggaaagctgtcaatgatcaagaactgtccattcaggtcaacctttttattcatttcttgccgtatctgataaatcaattgcaatagctgacgtgaacgtcgattaaaacgtgagtgtgataaacaattgaaacattcacagaatcttctttgtgattcaattcctgtcttagcttgccagataagtaaagccaaaatcagactgtccgtagttttaatttgatcaatatttcgccgatgagtaaactcagccggtgcatacaaacgataccagtgccgacaaattatcactaaatctttaaaactaacttgtaaatggtggctaaaacgcttaagcttaaggcagttcaatcagatcagactcttttctttttgatactacaacttgagtctagtccgattggacttttttattaactaaaacgatttaactagcaccacgcgtattaataatatatattatatgggggttgctatattaatatttagatttagcgcgtggtttttgtacaataaattacgtatgaatgtagctccaggttattttgaagtaatgggatttgcttgggcgagaaatggagtaagtagattaccaggtacttttttagataattacgtatgggttatggctcttttcaaaatcatcaaagaaaaaagtgttgtaattaaaacacgtaatatctcagttatagtattatgctttttatatgcatatattgtgtatgactcacgttcacaacaaatagcctatttattaagtttagtggtattcatacttatcgttagtgatacttttaaaagtaaagctctagatgtggtaggagctatagccattagtccaattatttttagaggaaattacttaaataaattggttaatactttttcaacttcaaatgcagactatggatctagtactcaaataagaatgatgacattaaatacatatcaaactctttggatagaaagaggtgtatggtggggatatggtatatcaaacgatgggaattattttaatatattggatacacatatggtaaaccaatcagatttaggtatattatctatgttatttcaatatggaataataggttttgctatttttatatcgccatttgtaatgggattatatgtaagcttaaaaaaagtcaaatttgttcaaaataagtttttgtttttactaacttgcactactgcattaactagtataatgtcacaaaatatgtatgatccatttagatttctaatagtaccatttttattaagttttatttctgtagttagctttatgaataaaaaggagaattaaagtttatgaggaaacagcaagttgccgctattgtagtaacatataatagaaaaaagttactaaaagaatgtattaaaagcttattggaacaaaccgcaaagccagatatatatattattgataataatagtacagatggtacagttaattatattgcaaaatatattgatgataacagtataaactatgttaatacggggaaaaatcttggtggtgctggtggatttcagtatggtataaagatggtagctcaaaaggattatgattttgtttggattatggatgatgattgcataccaactaaaaatgctttgaatgagtttcttaaggcagatataaaactaaatcatgattatggttttttgtctagtaaaactttgtggaccgataataccttgtgtacgatgaatattcagagaaggacattaacaaaaaatgtgtctgatttttcatctgaattgatacctgttactttagcttcttttgtttccttatttgttccagtttcagttatcaaaaaagtagggttaccaattaaggaattctttatttggactgatgattgggaatatacaagacgaatttcctcaaaatatgaatgttatgttgtaactaatagtattgttgtacataaaacaaaaactaatgttggtgcaaacattgcaacagatgtcccagaaagaatagaaagatatagatatttgtataggaatgattttttcttttatagaaaggaagggctaaaaggatatggatatgaatttttacgtttaaatgatcacatgataagggttttgttcaaagctaaaaataataaacgtaaaaggttaaagatgatatttaaaggaacaattgagggattacgttttaatccgtctatagagtatataaaataaaaatgtagaaagttggatagtatgaaaaagattttagaggcgtttggtgagccaattttgtatggcgggcaagaggcttttgtatttagaacaattgaaaatatgaacaaaaaaggtctaaaattcgattttttaacaccatattatgctgataatcccgactatattagctttattaaatcactaaattctacgctatactcttttaatgttggaaagaatagatttaatgttgtaaatgcatataaaaaaattctgctagataatcaatatgatgttgtgcatataaatagtggaagtatatctatacttgcattatttaccttgtatgctaaaaaagcaggtgtgaaaaaagttattgtgcattcgcacatgtcaggaaaaaataaaaatgtaaagcatgaagtaattaaaaagatttatgcaccaatctttagtaaatatgctgacgttttggttgctccaacaaaaaaagctgcatattggcaattttcaaaaaaaatttttaacaaaaaaggaagaattttgaaaaatggaattaacatacagcagtatgcatataatattgggactagagaacattatcgtaacaaattgaatatttcagatcatgaaatactaattgggcatgttggaaggctatcacctgagaaaaatcaaatatttttaataaaattattaagttattttattaaaaataatactaaggctaagctgttacttataggagctggtccacaggaaaaatcaatacgaatgagtattaagcaaaatcgattagagaaatatgttcaattaataggaaatgtagataatgttgaagattatctacaagcaatggatttatttatttttccttctgaatatgaaggactaggaattgcaagtattgaggctcaggatgctgggcttccggtattagcttccactaatgttcctctagatattaaggttactgataacgtgatgtttcttgacttaaatttatcgcttaaagagtggtataagcaaagtttaaagttactatccaggaagtatgatcgagcagaaaatacaaattttttaaaaaaacaaggatacgatattagaaatactgctgaaaagttgaagaaaatttatttggggtaataaaataatgaaatcagacataaccgtaattgttccaatgtataatgttgaaaaatacgtaaaaaaatgttttgagtcattagaaaatcagacatacagtaattttgaagttttggctattaatgatggatcgccagataattctagtaagtatgcgaaagaatgtgctgcgaaagataatagaattaaagtaattgataaagaaaatggtggctatggttcagcgttagagttagctataaatagtattaattctgattactttttggtgtgtgatcctgatgattggttggaagaagattgtttagaagtactttatacatttgccaaaaataatgacactgatattgtagtaggggatcgatttgatgtgtatgctgatgatggaagtgctcataaatgttctgtgaaaccaggatatttagaaagtattgaacctaaaaaagtatattcagaaacacaggatatacagctgtttttctacccaaagtcaagtattatcaatgatttaagaaaataaatttacttgttttaatgatgcgaataaggttaaagcaaataagagtttaaatttaagaaaaagcgaaagtaccacaaataagcctatgaatacttgtagtttttccataggttgcttatacttaagttgattatttgatttcagctaaagtcttttattttcggtggctatgttgtaatcatataattgatcatgtttgataagagcaaacattgtgcgtatcagtttatggactgatgcaatggcgattttcttatagccttgtctatttgaagatcgttttttcttgtcataataatcagttatatggcaaggctgcgtagcctttaccgtctccatttgagtaataactcgataaagtatttttctggcaatatgattgccatgcttggtaatgccaagagaactgtctttttcaccagattggtaccttcctggatcaatgccaacaaacgcatcaatttgagctgaagtgctaaaccgtcttagatcaccgagctctgctactaatctcactgctgtaattctagcaacccctgggatactcaaatagatggataaagcacgagcgtttactgctttagccagcttttccatgtagttaattacatagtcgcgttcttgctggagtgaaaataaattagaaatgttcctttgaatagctctaacgataatactatctttggaatcataaggataagcttctctagcaaaagcgtataatcttgtggttaagtaccgtgccctttgttgtcctattccagaaatagaattaagcatttgagttacctgtgtctcattcttttctagaacatatccagcatgtgggaaaagactaacaagcgcccaataaattctgccagatggatgagacagtatttcttcaatttgtgggaaagtggattggaggttgcggtgcaattgatttttagtagtaactatactcctagtaagttcttcataatagcgactggcattctgaagttcatgatactctctgggctgtggatcacgcagcttttgcggggcattaaattgaattaaagccaggcgataagcatctaccttatcagttttattatggcgtaaattattgtccattagctttttcgctttaagcggattaagcttcaaatacttaatatgataatcctctaagaaagcttgcaggcttagagaataaacaccagtagcttcgaaaacaactaaaggagttatcaaatattggttcagttgctcataaagtttttgatagccaaaggaatcattagagattctaaaagattcgccttgtttgatccggtcattaaccacacaaactgtggaagatttactgctaacatcaataccgaaaataatttgtgattccataatataacctccgctgtgaagataaacctctttatcaacctattaattctaattttctaaacacggcatctaagtgcccacagacttcgaagagacttaagaataggtggtaaagcagtccgtttcttttacgacatcaagtgtctaaaaagctgaagacttgatttgctttatcttcactttctattttagacaaaataaaaagtgccagatcgtgaatccgtcgattcatgatccaacactaggttagtatgtttctttttttcaagtttcaccgcatgcaaaactttataaaacccaattgctaaaaaatgttagtttccctaaacacgtgagttatacggattttttgttatatttggttgcgttgtctagagcgaagaaagtatcatattatgataaagccctcgctttttatttacaagatagaccaggaaatacagcaactgatataagaaagtctataattaatgattatttaagagactgtaaaatagtttgtgtaaggatgaatgattccttaaatttatttctttaaacattagaaaaaggagttcctttctcgtatgattggtttgaacaaaaaaaacacatacagaaagaagaactccttcatgaatgattttaccaaagattttgctcaagctctattcaatccagacaaaataaatgatttattgcgcaaagaactacaacaggctgttaataacttgctagaagctgaattgactgcctttctgggctatgatccctatgccagaaatggctggaatactggcaactctagaaatggtgcttatttccgcaaagttgatacgcaatttggcccaattgaagtgcaagtgcctcgggatcgcaacggtcaatttcatcagcacacgctgcctgactacaagcagcactcggatatcttggaaagcatgattatcaagctttactccaagggcgtgaccaccagggaaatagccgatctaattgaaaagatgtatggcagccattacagtccagctcaggtatcaaatatttccaagcagatgattccaaaggttgaggcttaccacaaacgcaagctaagcgacaagtttttctgcgtctatttggatgcgacataccttcctttgcgccgagaaacatttgagcgtgaagcagtctatattgccattggcatcaagcctaatgggcacaaggaggtcattgactactgcattgcacctagcgagaacattgaagtctggacagatatgcttcaaaacatgaaatcccgaggcttaaagcaagttgagctttttctttctgatggtgttgttggcatgaaaacagccttggccaggacttatcctaaagctcattttcaacgctgtttggttcatgtcatgcgcaatatctgcgctaaagtacgcgtcgacgatcgtgaaaagatcatgaacgaattcaaacaggtgcatcaacagacaaacaaagaagaagccacagctgtcctgcatgacttctataccaaatggggcaaggtttacagccatgttatcagaagcttgaaagacatagaaccagatctgctggtcttttataactatcccaagcagatcagagcttcaatttattcgactaacatgattgaatcatttaacaatgtgatcaagcgcaaagctaagcctaaggcagagtttccaactgaacagtcgcttgatgcttttattggcattcaggcaatgagctacaatgaccgttatttcaatcgaattcataaaggctttggtcaggttcaggacaccttagaatcctactttgattaaataaataattaaaaaatcaatttacgagaaagatctatttacacaaaagatttgacagtttcggtaaaatcacaaaaaagttgacgtatcatagagatataatggatgctccgtttatatttggcaatattgtctatttaccaacttgttattgtgtggatccagtatatttagttacaagacttatggaaaatactaataaatggagtaataagaaagggcattggtttgaagattatgtaatagaatttttaaaacagtctggatatagtatagaaaaaaagaaaaatacaataagtgataaatcaggaaaaaaagaaattgatataattcttatagatgatgatcaagcctatgcgattactgaatgcaagatattttctaatccacatagtataaaatattttttatatgaaaatgatcgtatgagaactaatttgtatttaaaacatgcaaataaaaattttgaatattttgaaaataaagcacagtatgataattcatatagaatttttttgtctaatattatatttccagcaacaaatgtaaaaaaatggaatgatgaaattaaagcagactttatttactatttagatctttataaattaagtaagaaattgccaataaatgaaatgaaggatattgaaaatcacgtaataagtaagtttgagctaaaccgagaatttcataataagataaatgaaggaaatttgaaatttttaaatgatgttagaccagtacttattttaagaaaagaatgtaaaaactttgatgaacaaataagactccagtctattccgcttactgataatctaatttggaatagattagattgatatagctaaaggttgaaagtgttgaattgtcaaattaagtgcaacagttaggctatgaagaaacatattgcttgaagatttcttctgctgtctgatattggaagatttggatatgtttgtggttaatggcatgaacataagcagctgacttgtctttcatacttttgcatttagggaagaattgacgcaaaagaccattgcagttctcattggtgcccctttcccatggagaatatgggtgagcaaaatagatcatctggcagcctttggcatgtgcttgcccgatagtcaggaatcttgataactacttaaagcatgtggttctttcagtcaaagtcattaaagcaggctgattcttgcgtctgacgcctttaaccagatctccttcccagtgcagcggagcttttctgtttgcaatctcctaggacgctgttcaatggaattgccaagatgctttttgtgcaaagcgtgaccgtcgtggttgtgatgacgcttgttcctgcgtcttttgagcttcatagacatcaatattgtttgaattcaccaacgctgtacgatatttaattgatgatagtgcttagaaatgctagaatttgagttggtcatgaagatcttcctttcttgatttttcgtcacttcaagtttaggtcttcgtggcctttttgtttaacacttggtgttgcacttcaattttaaatccggaaataaaattttttgaatatttaaataatgatttttgataaaaagagtaaaattaagaatagtggcattagttaagtgtatttgaataacgatatattatagatgagggggattagattgagactaaagacattactaattaagggatttaaatcgttcaatgaagaaacgaaaattgatttttcaaaagaaacagcatttattggtacaaatggttcagggaaaacagcctgtcttcttgcacttaataaattattctcatataatgcatcggatagaataatacatgaatcagatttttatataaattcagcaaatcaagatagtcaatcgagggacctatatattgaagctgtttttgagttagataaagctaataaagacgaagataagaagtgtgaagcacagtattggaatcggctaatcataaaaaacggacaagataagccgcttttacgaattagacttgaatctacttggacgaattcaggaattgctgatggaacagtagatacaaatatttacttcatgacttctctagaagataataatgaagaaaataagatagtagctagaagatcagagttaagcagtatacagttcatttatgtacctgcagttagaaatcctgaacgacaattaagtaatacctcagatggaatgatttctcaattgataaaaagagttaattgggatgatgaaattaaacaaaagatagtaagcatttcatcacaattaaatgatacattttgggacgaaaaaggaagtaaattaatacaagatactttaaatcaagaatggaaaagtctagaacctaattctagattttctaatgtaaaagctagtgtatctagcatagatatcaataagattatgagtcgtatacggtttgaatttaattcaaatgtaactaataatgtattttctgtggatgaaatgagtgacggaataaaatcattgttttatatttctaatattgcaagtgttttagcaatagaaaatacggtacaagaggatgatataaaaattgaatatcctgttgtaacaatatttgcattagaagagccagaaaatcatatttctcctcatttacttggaaaagtaatggataaagttaaaagcataactaaattagataatacacaaactataatcacctctcattctccagcaataataaaaagagtattgccagagaatgtacgctattttcatttgacaaaagatgccgtgacagaagtgaagaaaataaaattgcctgatgacaaaggagaaaaatataaatttattaaaagagcggttcaaacttacccagaattgtatttttcaaaattagtaatattaggtgaaggcgagagtgaagaaatagttttatcgaaaataattagttcgtatactggtttagatgaagcaaacatatcaattgtacctttagctggacgaatggttaattatttgtgggatttattagaaagcttaaatatagcacatataactttgttagatcttgattatgggagatatttaggcggaaagaaaagaattaaagatattattgatgagttgaagcgatttaatcctaatgatgacgaattagaaaaaatagaaaacaaatgcgccgatttagcagaaaataaaaataatttgttggatttgacgaaacaactagaaaagtatgatgttttcttttcctttcctttagatttggattttatgatgttagcagcttttctggataaatataaaggaatagcatcaggaagtccaaagaccaaagcggatgaacgcaaaaaaattttggatagaactttaaaaggaaaaagagaggaagaagttgattatgataaaaatgatatagaattaatgagatggtataatatgcttttcttaggaataggaaaaccattagtacattttactgctttggaagatatatctgaagaagagctatgcaataatttacctgaacaattaaaaagattacttgagtctgtaaagaataaattggataagaaaaatgatgaataaggatcaatggaaacctagtaatgggatagttttagaatcaaatgcaaaacaggctatttttacaaatgataatattttggttcaagcaggcccaggagcaggtaaaacagaattattagcacagaaagcatcatatttatttcaaacaggattatgtcctgctccttttaatattttagcaataagctttaagcgtgatgctgctgagaatattaaagatagagtttcaaaaagagttggtaaagaagagggaagtagatttatttcaaaaacttttgatgcttttgctaaattaatagtggacagattttatttagtattgccgaaagatttacgacctagacctcagtatgaaatctcctctaattcaactcaaacaaaaatatacgaacatgtcttcggctatgttcctgatagaaacgctgtaaatgatcttttgaaagtagatttgaatgatataaaccctcagagtaataattataaattttggaagtatatgttaatgggagaagaaaaaacgtatttgacttttgaaatgatttctagactagcattatatattatccagcataataaatatgtaagacatattattcgatcagcttttccttttgtgtttctggatgaatttcaggatactacagttttgcaatatgatattttccgtgaatgttttttaaatagtgaaagtaaaattacggctgtaggggataataagcagcaaataatgttatgggctggtgcggataaagaaatttttggaaagtatacgcgtgaatttagagcaacaaaggtatttttaaaagaaaatcatcgatcagctttaaatatagtgaaattacaaaaacttatgtatgaaaaaatagataaggatataaaccctgacataataattaataaaaataaggatgaagggaaagtttttctaatagaaactaacgaaccctcaaaagaagctgaaattgttggggaaaatattataaaagaaatacgtatgggtgttaagccttcagaaattgctatattagtaaaacaacgccctgaagattacataagaaatataaaagagtatttaaaaactaaaaatgtaactgttagggttgaatcaaagtatactgaaactttctctgaacctatagttaagttgattttgaaaatgattttagcgtctattaacgtgataaatggacaggagtggcaagaactggtagatgagacttctgaaatatttctcattaatttagctgatgctgaaatagagcaaaaatatatcaaaaaattaaatgtattccttgataagctatttaaaaatctattggttcaagtccatgagaatagatcaaaaagtaattattactgtaaaatcgtagaatctataatagacttttttacgattaataggcttcaagtttactatccagaatacttagaaatagatcaattaaatagaacgaaaactcaatttatagagcagcttaaagaatgcggatcaataaatgagttaaatactgacatcaaagaaatatggaaagaaataattgacaattatttaggaaagaattcaatagcaactttaactatacataagagtaagggactagaatataattctgtttactttattggattagaagatagtgctttttggagtttctcaaaccaatctgagtctgatcgtaaagcattttttgtggcaatttcacgtgctaaagaaaagctgtactttactttttgtcgaggaagacaaacggttagaaatatttatcaaactaaaaaaaacattaaggaattttatgagttgtttgacaaatcaggtattgtaaaggaaataaatgataataacaattcttgagactgtagaacagtttgtgtatatcataaatagattttttatttaattaaaggctgaaagctagaaatcatgcctttcccgcgtagttccttgctttttttgtctataataaaaaaagcaagacccctgtgtttcaatgtcattaagttaagacattgacaattaatattagacttttaaagcactgatttaacatttaattggttaaattggtgcttttttcgtacaacaaataaggcatagcacagattctgcttttttaagctacgcgatataaataatatacagctgatttgggcttaatatttctcttgtccttgcggcctggtctaattggaatggtataatagctgatctgaataaggatccgttcaaaatcttgcgttaaagaagaagccaaatacatgctctgaataatcaagcatgattgcttgaaattgatggcatattgatacttgcaatgcttttgcggaatataggcctgtgcatcaatttgactgattgcattaaacataatcatatgggcataaatttccatttcaataaatttatcttgtttggaatggaactgtacactgcctaaagaatacttcaatttcttgaaggaggtctcaataccccaacgcagatgataaagctctttaattctttttagcggataattttttcgatcaagattggttagcacaacttcccattcttctttgcctgatttggcatcattaattctaaatttgcaggctcgaaattttattgtgcataactcgccaaaatcccagcttagatcctgggtatttttagagcgatacttaatatattggcgataatgatgctggacatggtgaatattctcactggctttatgcgtgatgtagtaatagttagaagtagttaccaggcaggaaatctcacgatcacattcttgatcaggcaatgtcgttatttctttaactccgccttgtccagccttagttcgtattatgtaatgacagttaggcaggcgattgcagttttcaatcatattgaaactagtgtagccacgatccattgttacaatatatggaccacaattcaaagctttaagcatttgaacagccgctttgcgttcatccatttctgatttaggctgaaaaatacaatcctggtaggtattattcaatagatcatataaggcattaacgtgaatttgacaatagggtttctttttatgagaagaagcttgtacaatgttattcgatttcggattccagatttgattaaagtcagagccatcaatggcaaacaaacggtagtgatgatcaaaaagttgaatattaaatagattttgattaaaaacagtcagaatatgtttaaaacaagcaggagaaagctggcttttgcgttgaacataggcagaagtactaactactttatcgttctttttagttgcatcttcgccaaaagctctaaagagttcactgtttaaattctgaccttgcatgttaattgtagttttaaggactgtcgctgcatctaaagtgcgtttcctggtaaaagcatgaggattattaataaaatcgtgaatatgatccccagtattattgataatttgatcaagacgttctagaatattcttatgaagggctttcataattaacaccatctttctggcaataattttgaaggtttaaaatatataatatataagataggcgaaaaggctggtcttttcgcctttattttatacaaaaaaagagatcgaatccaaatgattcgatctctaaaaaagcacccttaattgtcaatgtcttaacttaatgacattgcctgtgtttttctcgtcattcactgttccatgctggcaaaagaagggccaaagccgccgacaaatgaatattgtagagttaattagacaagcaatcagtctaggcattctcgccaaatatgttttgtttgattcctagttttcgttaccaaaaatcaccttaagcaattaggacttgtggcttaggcattattaagcgcaggtaagttagtccccctagttaaattattcagctttacgttcgcagatggtaaattaaaatctactttaagactgccaaacaatttttagctttaatcaaattgcaaatttaaaattatgacggctaatgcggctatattgcgactacagcggttgcttatgatcttctggcttggcaggaaagacaaaacaatgatgaagacttattctatttaatgaatgattctttgcctgacatcaagtttattgatacattggtctacctgattgatcaactgaaaacgattaaggaatagataaagagaaattaacaaagcttgatacagtagtaacttaaacttcccacactaaataagccagtaatctcttgatcttgcttggctttaggcttctatattatttttgctagttttctttaacaatttttgcatgtatttgggtaaacgattgataaagtcagccgtgaattcagctatttgtgcttcactggcatgaaagacttgctttacgctggccagcattgcatcagtaatcaattgcaaggaatggctaaaagtaatgtccgccagctcatcaatcatgcaatagaacagctcgcctagcgtgcgttcatcttcatcgtcccgcttggcaactgacataagcatgtagcgagtaaaaactatggcaacatgagcggtcaaagcatcgtaagacaggccatgatattccgtacttagttttagataacttttgcaagttttgaaaaaaacctcaatatcccaacgcttgccgtagttgcggataatttcatcttcgctaagcgacatgtcggtacaaatgattgccagccaatccttgcgattggcacggtttctaacgcagacaatccgtgcatctattttagcaccgtctttgtcctggcgtccgactttgactgggattgacagcaggtagcgagaacggccgcatcgctttttacagctgcgataaatctgtttgatgtttttgcgttctccctcaaattcatatttgattttggagctaaccttaaccatggcaatcacatccagcttcctttgcttgagctggacgatttgatgtggatttgagaaccagctgtcaaacagcacgtacttggcttgatgacctgctttcatagcttggtcgattaaattaaccatcacgtctgtgcctttagtccgggcaagcatacgtctttggccagcaatggtgcgctgatcaaaaactttattttcgccaatcatattctgtagcttctgagaagacagcagcactgaattgattggcatgaaagaagctccatcagtccagcccagggtcatcatgcgaaaacctttcttgtaagtcattgatacatggtcaaaaactttggcgactaattctgttttcttgaagccggtcctagagaagtaggaatcatcgacaacaaagcaatcagcccgtttttctgaagtcaaagatcgcaagtggttattaatgatttgcgcagacagaagtgtggtgaagtggagccaattgacgtgaacgttgcgcataaaacggtaatatgagttcttggaaaaattttcttgaaaatgatccattttcagctgcatatataagctgcggtcacgaaagacattgcttaaaacgtaaagaaacaagctgaacaggctaatgcctttttccttgcggaagccacattttctcaacagcttgatcacctgaaacttcttgatgaagctgatgattgagtttgaaaatagttgttcattttgttggtcaggagatggtaaaatagacattggcacaagcctttcatgcaaataaattatgttttggtcaatataattatagcaatgaaaaggacttgtgccttttatatttgtcaaaacacgcagaatcacaatgaaacaagcaattttgcgtgtgggaagtttaagtaataacatataaatttatgttttttgctttcttatcgatattgtttgtaatattggatgtaatttttgcttgttatatgtatcgcaaaaataaaaatttagagaagtacacaaaagtagcgaataattactatgatatctataacttgttttttataggcacattaataaattggattagtagtaacttaacgctgaacatattaattgtgatgctgtttatttttggtatgttttttgtggttgcgcttataaaatatgaatttgaagccaatacaaatcaagtttctaaatcaaaatggtggtatagctttttaaaagacgtattagccaatattatgattgcatttttgctgggaatatttgcaaatacatcttttccatctacgtggataattatattaatcattttaagttttgcattctatatttttcttttgaaaaaaagcgaatgataaaaggagctgtaaattttatcatctgtactttgctggcatgaaaaatattttggattttagctagcattgtctatcatagaaatgaaatggggatgcgtccttatatttgcaaaattatgcagatcacaggaaaatagacaattttgtgtgagaagtttaagtagttgttgataggttgatataaaaataataggtaaaaagatggaaataaagaagaatatattaaattcatggattttaatggaacaactatctgagggtgacgtaaatactaaacgtggggatagaaatgcagctaagcaatttgatccaacaaaggctgagggacatggctattatgaatactttcgttggatgattaaccgtaaatataaaggtagtttaaccaaaaaaagctcaaattcaggattgatcttctacattgatacttttaggtttcaacaagttatagatataattgttcacaaatatcatttaaaaaatttacaagacgaagttaataataagcaaactaaatttggagtttctattgcatttaataaaaacttacacttattagaagaccaaacttttgttacaatgagtagttatgtgcttaataaaaaagaattaattgatgattcagataagttcaaaaagtttgaagatcaggtgaaaaatgacataaatgaactttttggctttcaagaaaatgatttagatgaaaaaagttttgaacttcaatttaatgaagcttttaagaaattagtaaaacgatataaaattagcaaaaagacgagctattggtcaatcgttaaaaagattgattcagatgatattaatttacattcattttttattgatgatttgaactgggcaaaaaaggaaaagtccgatcatcttgaacgttacttgaatggtttaaatccagatcaacggattaatcttgatccgacgaagaatattgatatatttgataaaatattacaacctaaaaattatccaatggggcattttttgtcaaaatttccagcatctttaatgcaacaagtggcaattaacttggctataaatgataagaatgatatcagaactgttaatggccctcctggcacaggaaaaactactttattaaaagatatctttgctgagttgatagttagacaagcaaaagaaatttgtgatcttgataagaaaaatgtttatttacctggagatagtaaggtggggcaaacgaaattacccgaccaaatctctaataaaaatatagtcgtaacttcttctaataatggtgctgttcaaaatattgtagacgaattaccgcaaattcctgacaaagatgtctttaaagaagttattgatgaactattgaatgttcattactttgatgatatcgctaacgccaatttgaataagccaaagtattggggacttttttcgcttgaaggtggtcgtaaggaaaatatgaataatattatcgataagctaggacaaatggttaaaaagttgcaagatgaaaattatcaatcagacaccgatgcttatgatgattttataaaacaatataatcttgttgaaaataggagaaatcaattgcaagattatgcgaattctttagggcaattacaaaaatggcgtgaaaaagttcaagagtataagataacgactgtagcaaatggcgatattcttttttctaaattaacgccagttctccaagaagtaacagaagagattaattctaagaaagaagagtatcaagaaattgcttcatcaatggaaaatgttagatttagagatagattttttaataaagaaaagataacccaaaaaaggaaaaagaatgaaaaattatcaaaattaaaacgtgtgatagaggagaaaaatgctgagaagcataagttggaaaataaaatagatcaattgcaagttgaatcacatacttatgctcgaatattaaatgatgaaaagctaaaggaagcaatggttccaaactatcaacgtgatttttcaaatagggatgtttatgatcaatttgaggaagaaacatattggtatacctcgaatgatttacgagaagaatctaagctgtttgtattggcgttgcgagtaagaaaacaatttctttatgaaaatagcaaatcactaataatggcgatagttaattggaataatcaagataaaaaggtaaaagaaaatcaacagcaattaacgctatattcttggcaatggattaattttgcagttccaattattagcactacatttgcaagttttcatcggatgtttaaaaacttacctgctaattctgtggctaatttatttattgatgaagcgggacaagcagttccccaatcagtagtaggtccacttctacgtagccaaaaaattatggcagtaggagatcccgctcaaattaagcctgtcaatactttagattctaaagtgatttcacttattggtgatcgaattttcaaagtaggtgaaaaatacgtttctggagatacatcggttcaagcgattatggatcaggctagtcagtacggttattataaagacaaagaacatcaaaattggattggcattccgctttgggtacatagacgctgtttaaatccaatgtttaatatagctaatacaatttcttataataataaaatggttttaccaagtaatgttaaggaaaaagaagctaaagggggtaaattagaaaagaaacaaggaaaaattggagcaggaaattggattgatgtaaaaggcgtatctcaaaataaatttgtagaagaacaagcacgaatgttaaaacgcttgattcaaaaaattgtaaacaactcgaataatccatttacaatggatgatatttttgtcatcactccttttaagaatgttgcttatcagttgactaaagaactaaaggatattaactttattaaatatgaaaatggtaagccatcaaatgttggaacagttcatacttttcaggggaaagagaataaagttgtttttcttgttctaggtgcttctgataaagaaaagggtgctgctaattgggcggtaagtgagccaaatatcataaatgttgcagctacaagagcaaaagtatggttctttattattggtgataaaaaattatatcaatcaattggatcggaaacgattactaagactataaaggctattgatgattacaatcgtaaaatagattcaaaaagtaattgattggttatgtcagaattttgtataaattgagattgatatttatttactaaaggttgaaagcgcaactatttataatttgttacaaacaaagtttaatgcttagtttaagaaaacgtgtaggaatagaaaggattacaaagttatctaattagttgcaaacatatttgtaactacgtataataatacttaagacagatcaagtttagaggcactaggagaaggttctaaactaaacgaaaccttgatataatattcacattggatgttattatcaaggttttgtttttttaggagttaatattggaactaacgagtaggccttttaaaaatttggatcagcaaatagacattctccgacaaaaaggaatgttaattgaaaatgacgactatgctaaaaatgtattaagtaaaataggctattatactttaattaatggttacaaaggtctctttttaagaaaaaatgaccgaggtaatataattaatccgcatcagtatattaatggaacgaaaattgaagatatagtctctttataccagtttgataaaaagttgagagccattttatacaatggtcttctttcttatgaaactacattaaattcagagttggcttataggttttcagaaatgtttcctgtagaatattcttatttggatattaataattttaagcacgatagtgataatactgttagagttttaaaaacaatcagctcactaacaacaaaaatagagcaagaagcgcataaaagaggaagaaatgcgataaagcattatattgattctcatacttgtataccattatgggttgtaacggaatttatgacttttggagatttaaattatttctacattaactgcaaggatgaattaaggcagaaaatagcacgtgatttcactttaaagtatagaaaaactaatgacttatcccagagtaatgctattacgccggaagttattgaacatataaaccatgttacgaatatgtttagaaatgctgttgcacataacgaaataacttattctaaagtaataaatcggggaccaaatttgagttctgttagaaatatcttgggccaatacgatttaaggcttaatagtcaacctggtgtatttgaacttatattaagtcttagactggtgttagatcaggcagaatatgttgagatagcaaatgctattaaacagttactaagagatggtaaggagcaatttaaccctgatactatgtcgaatattttaaatagtatgcattttcctgaggaatatgagttttggctgtaatgggatgcatacgattaagggaaagatggatatggcaatagctaccagactttttatatagctacaattcaacaataaattgtacttgtcagcataaataagcagaacctttttaatatttagtacagcatttcaattctaaatctaattttgctaatcacagctaatatttcaatttgattaagaaggttccaaaaatccgaacaagatattataataaactggctatggaataacagaagggaaattgaacagagatgaacaagagaagcacattagttacctttgcatcagcagctgttttacttggcttgtttaatataaataacagcttaacagttaaagctgatacagtagagcaacctgcagttggtcagagaaatactcaagctgcaaccactaatgatcaaaacgataaatcagatcaaaatcaagcacaaactaaccaaaataatgatgtagctactgatcaggaccaagatcaaacaacgcaaaataatactggggcaaacaccaccaataatacaaataatcaaaacaacactggtgttgcagatactactaatactgatcagaatgctcaaaaccaagtaggggtggacactactcaatctactagtgataatgtttctaatggttttaataatactagttatagccaaaataacgacgcagcagtttacaagttagatcctcaaactgttcaaatattacaagctgcagatgttaatcctaaggatttaactgaagtccaacttaaggaagtaagaaagttgaactttaatgagcttgataaggatactagtactcactggagctatgatcaatatgctggcgtggctaaaaagatgattgatcaagatgcgcaatatcgcgtaccatattttaatgctaaaaagattaaaaacatgccggcaaccgttacgcgtgatgcacaaactggtcaagtagcggaactagaaatttgggattcatggccagtacaagatgctaagactggtagagttgttaactataaaggctatcaattaatgatcgccatgatggggattcctcagcaaaatgatgcccacatttatttgctctataacaagtacaatgacaataatcttaaccattggaaatgtgctggtccaatctttggttttaatgctaagccaactgatcaagaatggtcaggctcagctacggtaaacaaagatggcagtattcaattgttctacgctgatgtagacacccgtgaaaatactaatcaccaaaagattgcaacagttaacttgaagctgaaggttaacaagaagaaaaacacaatttcgatagctaagagaagtcaccgccatgttttattcgaaggtgatggttatcactatcagacatacaagcaatggaagtctaccaacaaaggtgcagataacgttgctatgcgtgatgcgcatgtgatttctgttggtggtcagcgttacctgatttttgaagcttcaactggtagtaataattaccaaggagaaaatcaggtctataattggaaaaattatggtggtacacccaaggaagctttgcaaaacttcttaaaggtgactgctaatgacgacatgaggagtcgtgcaacatgggctaacgctactattggtatcattcgccttaccaagaatgagaataatcctaaagttgctgaagttttgccatcattagttaacagcttgatggtatctgatgaaattgaacgtccaaacattattccaatgaacggcaagtaccatttatttgctacaactcgcttgaaccgtggtactggtgatgatttgtggcagcaagcagatgccaaagtcggtgacaatgttgccatgctcggctgggtttcagaccacttaacttatggttataaaccacttaatggcgacgcagctgtcttggtagctagtgttccatttaactggagaacttcaacttattcatactatgctgttccaattaaaggaaacaagaaagaagtattagtaacttcatacatgaccaaccgtggttttgcttcaggtcctaacaagcgctcaacaatggcaccagcattcttagtaagaattgatggtgatactaccaaagttgagaatatcgccacagctcaaggcgactgggtttacgataagaagagcaagcgcaagtcaatgattgcgaaaacgattcgcggcgcgcatttgaagggcgaaccgattgaccatagtttgcttgagaaggcgtagagttgtattgatttttagtgcaatgtaaggttagaatttgagtgttaatttctgtggtgagacaattaacaagtttgcggtctttgctcttatgaacgaaggtcgcttttattttggcgtggtatcttttaagacattattgtttgttaattcaaacaagctttaaaaacgatattttcatctttaatgtcaagctcgatttaatacaatgattaagagaggacatagaaatcacctttatttataaaatatttagtggaatagattttttatcaaagagaactatgtcctccttttttgatggaataaaaagctattgacagggaatattatggagtcggttttcttttgtgctgaggttggggatgctgatataattgatgaagctaaagaataaggttagactatggctgatagtctatcgcaaaaacattaacacttactgtagttcaacaaagaatggaaaatatcatgattttgacgtaaaatgtttagacaaaggagagtgacccatgcgccagttctatttgataaatgataacttgtctgagcaaaaattagccgaagaatatttagaagatgaatataatcttaatcctaatattcaagaatcggtgttaagaattatcaactttctttcaaatgttactttagatagtagtggtaatattgaacaattaaagcccgaagtaaaagaagggattattattggatattcttttaaggatgagtataaagttccaaattctaacagatatatcaagtacgagattgttaaaaaattgatgtcacaaaatcatgtatatgagattcgctttctttctgaaacaaatgaaggcgtaaggaaaaactgtagaattttatttacattaaatgagagtaaagtatattttgtctggacatatggatttactaaatttcctactaaagatcaaagaaaaataagaaaaatgaatttacttactgatcaacttgggaaactggctgaactaattcataatcaattggtgaataatagggaaaagaattttataggaaggagaaacgaaagacatgaagttcaataaaatcaatccaaataatagtagattaaattcatatcaattccagttatcacaaaagattttcggaaaaagaattagtttgaatttaaatagagatgaagcagcaaaattaacgggtttgagtttaagcacgtatacagaagttgagcaggaaattgatttagaaagtagtgaagaaaaatatcagcaagttttaaataagttatctagtttttcaagaaaacgaataaaaataaaagaaatagataataaaacattacagcataaaacttctaaagtaatagcaaagatgaagataaacgaaagctctaataaacaaaagacactgtctttctatcaggtgggaataaaaaaatcagtttttcaaccacaaatggtaaagaaataggagataacgatgtcagtacagcttaaatataatggatttataattaataaacttaattatgaatacaaaggtgaactagaacagcaacaagacagtttctatttggaatttatgtttgatgatatttctgtggctatttctgcaaacgatgcaattgtgacattatcggggcatgccaattgctcaaatgaagaaaatgataatgattctgaatataggactttaaatattaaagtggattatttttatgatattgagaatccaaaaaaagttaaaagtccagaaaaaatccaaaaaatagtaaacaattatggtgttaataacgcaataattttatttcaagaattagtcaaacaaataactagtcttgatatagtaggcccgattagttcatatgaatttagattcccaggttcattgaaatagaggtgctttggtaattaatttccacttcttaactattaatgtatgtagtaagagacagagactagctaatgtgactctttgtcaaacaacttaaagtaggagatgaactataacgtgacgatgttgtagttcacctcttatttttttgtttaaagtttgattaagtaagatgttagtcttataagtagtaactagtgatagataatttatgaaactgtcaaatcttttgtgtaaatagttctttctcgcaaattgattttttaattatttatttaatcaaaataggattctaaggtatcctgaacctgaccaaagcctttatgaattcggttgaaatagcggtcattgtagctcattgcctggataccaataaatgcatcaagcgactgttcagttggaaactctgctttaggcttagctttacgcttgatgacgttgttaaaggatttaatcatgctggttgaataaattgaagctctgatttgtttgggataattatagaagaccagcagatcggactcaatttccatcaagcctctgaacctcatgttttgaagcatctctgtccagacttcaatgttctcactaagcgcaatgcagtagtcaatgacttctttatgtccattaggtttaatgccaatggcaatatatactgcttcacgctcaaacgtttctcggcgcaaaggaaggtatgtcgcatccaaatagacacagaaaaacttgtcgcttagcttgcgcttgtgataagcctcaaccttggggaacatctgcttggaaatatttgatacttgggctggactataatgactgccatacatcttttcactcaagtcggctatttctctggtggttacgcctttggaatatagcttgataatcatgctttccaagatatccgagtgccgcttgtagtcaggcagcgtgtgctgatgaaactgtccattgcggtctcgaggcacttgcacttcaattggcccaaactgggtatcaaccttgcggaaataagcaccatttctagaattgccagtattccagccatttctggcatagggatcatagcccagaaaggtagtcaattcagcttctaacaagttattaacagcctgttgtagctctttgcgcaataaatcatttattttgtctggattgaatagagcttgagcaaaatctttggtaaaatcattcatgaaggagttcttctttctgtatgtgtttttttgttcaaaccaatcatacgagaaaggaactcctttttctaatgtttaaagaaataaatttaaggaatcattcatccttacacaaactattttacggtttcacgaaataagatcctaattacataaataattaattggttataaccgactgatattataaaatttatatctttttatagatccaaaccaacttgaaatatgtggtcgtaagtgtatcttttttcttcaaaagaaagaaaagccatacctttctagatgattttaaatgagctaaagtaaaaatgaggtgattttaaatggaaccattatttttgatcccgtattttagaccaaaaatttggggcggacgtaaattaaaagatattttcaattatgatattccagatggaaaagtcggtgaggcttggatcatttccggctacaaggacgatgcttctattgtaacagagggtccactcaaggggatgtctttaagagatgtttacttaaagcatcctgaactttttggtaatcctaaggctaaagaatttccgttattagtaaaattcttagatgctaatgataatctttcagttcaagttcacccagatgatgattatgcccgtaaggtagaaaatgattctggtaaaaccgaaagttggtacgtcatgcaagctgatccaggtgcttacattatttatggtcaccatgctaaaaatcgtgaagaattggctgaaatgattcataagggcgaatgggacaaattacttagaaaggttccagttaaagctggcgactttttctacgtacctgcaggtactatccacgctttgactaaaggctgtttagttattgagactcagcaatcaagtgatgttacttaccgtttgtacgattatgatcgtgttggtaaagacggcaaaaagcgtgaacttcatacgcaaaagtcaattgatgttacaactgtgccacatgttgatcctaagctagatgttaagactaataaggatcaagatgcagaaatcaagactttagttgaaccacctgtttcaccacacttctacttatggcaaattgacctcgatggtacatggaagaccggcttaaaggatcatccatatcttttagtttcagttattaaaggtgaaggaaaattagaagccgatggcaaatcatatgatttgaagatcggaactaatttaattattccaaatgagatgaagaatttcactttcactggtaaaatgagaatagttatatctgcaccgggtgaggaataaccgtttaataatgaataagccattgctttgtaaaaatacaggcaatggcttatttgttttccacaataaggtgaaaagtaatgtcttctttttaattataaaagcgttttataatttggctgggggtgaaaataatgaaagacattattgatgaacaagtaaagaattatatgaatgaagtggaagcagaatgtggcactaaagatgaacgtttatatacaatttttaacaagactttcttagatactttgcagaatgctttaaaggtcgatgaaaataaaaatatctttgtattaaccggtgatattccggcaatgtggcaaagagattcatctgcacaattaagaccatatttattgttagctaaaactgacgataacattaaggatattattactcgagtagtaaaacggcaattttttaatatgaacttagatccttatgctaatgcatttaatatgactgccaataatcaaggtcatcaaacagataaagcaaaaatgggtccctggatttgggagagaaaatatgaattagattcactctgttatccagtacagctggcatatctactgtataagaacacaggtgaaacagctcaatttgatgcaaattttgtttctggaattaaaaagatgctggcaactattaaaactgagcaacatcatgagaattctaactacacctttgaaagggactgtgatgttccaactgatactttaaagaataaaggtaaaggaacgcctgtggcatatacaggaatgaattggtctggatttagaccgagtgatgacgcatgtacatatggatactggataccttcaaacatgtttgccgtagtagttttaaattatattcaagaaatattttcaagtattttggatgattcagatatagttgcaaaggctaaaacactgcaaaatgaaattaatgaaggaattcaaaggtatggtattgttgagcacaatggtaaaaagcaatatgcctatgaagtagatggtagaggcaactatgtgctgatggatgatagtaatgttcctagcttaatgtctgctccttatattggttacgttaaacctactgatgacatttatcaaaacacaagaagattcattttgtctccagataatccatatttctatattggtgaatattggagtggtcaaggaagtccgcatactcctaaaggaaatatctggccaataggtatggcattagtagggttaacccaagagactaaagcagaaaaacagaatttattgtatttaatggctaacacaaccaatggtagcaatatgattcatgagagttttaatcctaatgatcctagtgattttactcgaccgtggttttcatgggcaaatatgatgttttgtgaactgttattaagctatttaggacatgacgtaactttataaatatttaatttccactttaagtggaaattaggagacattacttatagaagagaatatgcaatcatattagatgtaaggggttacaaagaaggcccaacggacaagtcatgtggtaataagtcaaatgaaaggcgatgatatttgttctttttgatcataaatttgagtatatgaaactaagccttggtaaaggttgatttttttaatgttaaacttttgtttacttttaaatttagaccaatttttgaaattaagacctcggtgtcctgtacagtttgtcatctttgagcaatttaaagataactcgtactaattttcttgcagttaatgtgcaagcacgtttatgcggcgagtagacagcttcatcatacttcttttggtaatattttttgaaaacaggatcatgtaatcttgctagattggcagcttcaatcaagtaatatcttagatatctgtttccagtcctggccattggagtatgttcgttgctgtgatctcccgattgatattgattccaggttaggccggcatacttagccagctgttcttctttatcaaagcgatcgatacttccgatctcagcgataataccagctgtataggttttgccaataccgggaattgattccagaattttgctttctggtaatgcatcaacgatacgatcaattgctttttctagatctttaatagattcattaaagctttgaatcatgttgtaatgaacagaaagcactgcatcaattgaatcagtcattactttgcctaagcgatatgaacctctaacagctttcttaattgctttagccaaggtatctggatcggaaaagcgtcctctgcctttaacctgtaagtaagaaattaagtcttcggtaggcatatccgcgatctcatccagagttttactatcggttacaatagacatcattgtagcaccgaaaagaggagtattaatcttatctttatcgacagtgattagtttattaacccgataatataaagcttcaatgaagtgctgtttggtacgagtcagttcttgaactaattcatatctggtacgcgttaaacgctctaaagcaagatagttgtcttgtctggcaatgcttactcgataatgtccaaagcttagatacaaagcaatgtaataagcatcgagaggatcagttttactttcttcaaagactttatgaaacctgctggtttcttgggggttaattacatcagtctctacattgagcttttgtaaatcttcgtcattttggaaaaagtaagcaggatgaaaactgtaaatagatgtagcttccatgccaataatgatttgatcatagtgtttattttgagctagatctaaaatttgttttttcagttcactagcaccataaagatcattgacaaagctatcgttaattaagcgtttgttttgatcttctgaatcaagtgcaacgacctgtaaatctttagaactaacatcaataccgacaaataatttcattggaaatggcctcctttctttcaaatttctgatcatagattttgatcttcacatgttaacccctaattacagttcttaagttcaatctcgccagtataagtattcactggttgcttctttgaaagctgcacctaatcccaattgctcaaggactagcaaaaagaagcaatcaatacagcatgtgagttagagcataaaggaactgtctgggtggcagacttataaagcagacaaaactgcaggaggtgataacctagaccagttgaccaaagccaatgacaattagaggctaacatgtgaagatcaaaaagcaaatactaatttgattaattatcacaatatgactaattacaatttatataatacgagaggtgatttaatgaagtttgaaaaagaagatgttcttttaaacgtgaacgtcgctgataaagaaagtttgttaaagaaaatttctgaatatgctgaagaaattggctttactaatgatcctgaaggtctgttgggatcattcaaaaagcgagaagaagaatattcaacaggattgcaagatggatttgcaattccacacgctaaatctgaagctgtggaaagagttggtattatttatgttcgcttagagaaacctattgaatggaagacatatgataataaaccagttacagatgtttttgcattaatggtaccacctaaaaatgcaggtaatactcacttaaagatgctcgccaatctgtcgactgctttattggaagatgattttaagcaaaacttgaaaacattaaacgattcacaagaaattgcaaagtatattaggaaaaagataggagctaataaattatgagtgatgtaaatattgttggtattacttcttgtccagctgggctagctcacacgccaatggcagctaaggcactagaattagccggaaagaaattaggttacaacgttaagatcgagcagcaaggaattatgggtcgagttcatgaaattacacctgaagaagcccagaaagctgattttgtcttaattggctctgatcaaaagatcgaaggaatggatcgttttaagggaaagaaagttatcagagttgatattaatacttgtattcaagctccagaagctcttcttaagaaatgcgtttctgtagtcaaaggtgcctagtttaacagaataatgtttaactactttgaaatgaagggagtaaaatgatgaaatttaagaaactaatgcatgattggcaaggctatatcatgacaggtatttcctacatgattcctacaattattggtggtgcccttatcgttggtatcccacaattgataggtatggcttgtggtgtaaatgatctgggtaaatttgctaaagctactggcttcttccatatgctgtatcaagtcaaccaagttggttggataggtattggcttggtcaacttagtaattggtggttatattgcttatgccattggtgataaaccagcattgggtgcaggttttattggtggtcaattagctactaatactcaacaaggttttattggagctatggtagctggcttcattgctggttacgttgctcgttggtgtcgtaaacatattaatgttcctgaaaagtggaattctgccaatgaattgatcttaactccattgttaacaactggtgctgtagctattgtcaatgggttaattcttgcaggtccattagcgtggattaatactggcttgttggcttggattaaaacaatggttaatgaccatactaatggtttgattttggctcttattatgggtggcatgattggtgttgacttaggcggtcctgtcaataaagctgcttgggctgctggtaacttcttcttcctggaaggtgtttacaaaccatgtctttacactaatattgccatttgtgctattcctcttggttatgctttaatgacttttatttggcctaagaagagattctctccacaacttttggaaatggggcgtacaaatttgatcaacggcacattcggtattactgaaggtgctattccattctggatgaaagccccacaattaatctttgtaaatgtaatcggtggtgctttaggtgctggcgttggtgaactaatgggagtaagttcacacatacctccattgggtggtattccaggtatcttaactgctgataatattcctgcttatgtttgtggtattttagcctgtgctttgtttattgccgttgttgctccattagttgccaacttcactgaagacaacggtaaaaagattagcgaggacgatattaagttagacattactaccgaataaatcagttaatttgaaaaataaacaaaaagctatagtcaataacaaagtacttttcccctctagtttaaatttggctatagcttttttattagaaaagaaggttagttatggttaaaacagttcatgtagttccacatacgcattgggatagggagtggttttttactacctctcgcgcacagatttacttattaaaagatctaaaagatgtaattaataatttggaaaacaatgtaggttttaatcactttattttagatggtcaagcatctttgatcgcagattatttaaaatggcgtccacaagatttaaagaaagtgcagaatcttgttaaaaataaaaaacttattattggtccatggtatacacagacagatcagtttttgccatctggtgaaaatatagtgcgtaatcttttatatggaatgaaaatatgtagtaagttgggaggctacatgaatattggctatgtacctgattcgtttgggcaggaatctagtatgccgcaaatctataaggggttgggaattgataaagctgttttatggcgtggttttcccaattatgaagctacgcattcagaatttatttggaaaggtgaagatggcagtcgaattaatgtttatcgaatggcctgtggttatttcataggtggtctaattgatgaaaataatttagataagattatgacatctgagccctttgctagtgtagttaaacaagcaacaacagaccaaattctttttcctcaaggttctgatatggcaccagcgagaaataatctacctcaagtaatagaaaaattaaatgaaagaaataaagattttaaatttaagattagttctttagaagaatatattgctgcagttgataaggtagcacctaagctgaacatgttaaaaggtgaattcaatatcggtaagaatatgagagttcataaaacaaactattcttcaagatctgatttgaagaaaatgaatactttaattcaagactacctaactaacattcttgaacctgttttaactttgggtacccaatttggtatttcctatcctaaaggtgcagctgatgatatctgggaaaaaatgtttgaaaattctgcacatgattcaatggcaaatagtgtttcagataatgttaatgaagatatctatttacgatataaacaagctagagatatggcaacaagtttagttgaactaactttgcggcaaatctcggttcagataaaaaagcctgacgacaaggcaattacgttaacggtcttcaataccactcctgttgcaaaaagtggattagttactaaaaccatatacactccagcgcagaattttgagattcaagataaagatggaaaacctattccctttgtagttgccggttttaaagatgaaacagaagaagttaatggtgcaactgttcaattaaacccaggaaatagaatttatcagccagaaaaagtttataaaacaaagattagcctagtagtcaaaaatattcctccaatgggatatcaacaatattacttgattcctaatgtaggaaaagcagatgaactgtcagtaagcaatcaaactacgattgaaaatgagtattacaaaattgaagtaaatttagatggaagtttaagaatcacccgaaaaacagatgggcgcgttttcgataaacaagctatcttagaagacaacggcgatgatggagattcttataactattcaccagctaaaaaagattgggtaatttattctaccgatcaagcatttaaagtaaaagctaataaatctgctttgcttaatgaacttaagattgactttgattttagagtgccagctgatttagatgaacgtgcacatagaaaagcatttgtcttaatgccggtatctcttgagataaagttaaagaaagataacccagtaattggatttagggtagttacagataatcgccaaccgttagaccatcgtttatgtattgattttgatactcaaatagtgactgatgggtcaattgatgatattcaatttggcagcattaagagaccatttgaattgaagaaggcaatattggattggcaagaacatccaaatgattggcaagaaaagccaatttcgattaatacaatgcaaacttatacttcattatctgataagaacaatatgtttgctattttccctaacggtgtacgtgagtacgaagatattggaaaacaccattcaactattcgattaaccttattcagaacttatggcagattaggaaaagctgatttattgtatcgccctggccgagcttcaggggatgctactgtagcaactctcgctgctgaattgaagaaggtcttaagttttgattttggagtatatattactgattgcgattttgaaaaagcaaacgtaactaatgtcgccaaagaatttaagactgggttgcaagtgtttgaatatgcggaattcttaaatggaagattaatctttccatttaatgtagtcaaaagaaagctccctgaagaatatagtctttttgaaacgaagggtgaatttactactagtacagtaaaaaaagcagaagagcgtaaaggatacgttattcgactgtacaatgcttcatttaaagaaaaggaagatgaactcaaatttaacaaggctcctaataaagtagaattagtagatttaaaggaagagccacttaaaaagctagaggtagtaaataatacagtaaaattgcctaagcttacacatgataagatagtatctatttattatgaatattagataatatgataagctacattttatagaaatgaggtgacttttgcatgtctattacacaaccacgcttaaaatcaattttaacgtctttaatttctaaaaataatgatacttatatttcccctaaagcattagcagcaaagttaggtgtcacaactagaactttaagaagcgatattaagaatttgaataattctcttaagatatacgatgtctcaataaaaaataaacggggacatggcttatatctacttattaatgatcgagaaaagtttaagtccttggtcgagcggattaaagaaagtggtatcgttacagatggtggtgacgactataaaaaacgattaaaagattttcttcttttgattctaaccaaaccgcgtgagattgatgacattatttccactatgtatatcagtgattcaacagttgataagtatttgaaagaagctagaaaggtagccaaaaactatcatctaaagattcaaaaagatggcgatcttttaagaatgaaaggttcagaatcggatattcgtagttgcattattgattatatcgataataaaagaggcaataattatgttcgaggtttctctaaatcagaaaaggtgattttttctgatttagatttaaacaagttactgacaaaagttaccaatttaatcgtagctctggggcttcctatgtctgattatagtgataaaaatatcactattcacttagcattggagttagctcgcagcaaaactaataatcagcttcgtaattttaatcgaaatatcccttacattagagaggaatattttgataaggtttctaagttttttgaggaagttttccgtagctatgaattggaatatagtgaagcagaatttcattattttatttatcacctagctctaaattatccacaacttatgttggagcatagtaataatgacgtgaaaaacaaaaagatacatgacattgtcattgagttcttggatagaatcaaggacgactatgttttcaatctcatgcaagacaaagaactaattcgtaatttagagaagcacttggaattactactgaaagttaaaaatattaatggacaaagaaagaatcctttactaaatgtaattgtttcaactttcccattggcttatgaaatgacagtgacagcttcaccacttatagagcatcaacttaacatgaaattatccccggatgagttagctttcatcacacttcatgttggtgcttcaatggaaaggttatacaacaatcgttgggataaaaagagagctgcattggtatgcggctcaggaactgctactgctatgttactaaaggctagattatcttcgcaatttagtgaatatttgaatattgtgggtgtttattcattatatgaatatcagcatagtgatttaaaaaatactgactttgtaatttcaacggtgccaatttatgaaagtaaattaccagtaattcaggtagatttatctaactttcagaatgatagtaatgaactttatcaatacctcgtttcagtttcggataaaaataaggtcattatgaacttgtttgatggtaaattgatttatttacttaaagataagttaactaaggaaaaagtccttgatctaatgatagatgatctagaaaagtatcattatgttgaaagcgactttagagacaatgtatataaacgagaagatctatattctacggccattggtggcgggatcgcaattccccatccgataaagtatgctgccactcaatcaaaggtaagctttgctagattgaatgaaccgataaaatgggatgataaaaacatgattaagtatgtctttttgatttccgttaataagaaagactatccgaacattcaagaactatttacttttttagttgatttgcaacaaaatcaacagtttagaaatttaattgataaatgtaaaacaattaatgaaaccaaagacgtgttaagaacaataattcaaagcgttgggtatgaaaaataggaggcaaaacatggttaaagcatatttagttaaccatacacactgggatagagaatggtattttaccactcaagatgctcaagtattaagtgatcaattattcactcaagttcttgatgaactagaatctcatccagaagccaattttactttagatggacaaatgtcaatcattgatgaatatgtagaaattcatccagaagctaaagaaagaattcatgaccttgttgaaagaggtcaattatttattggcccttggtatacacagactgatgcaaatattcctgctgcagaatctttattgagaaatttggtaattggtattaatgatgccagaaaatattatggtagggcaatgatgttaggctatttgccggatactttcggctttaatgccaatttaccaatgattcttaatcaagtaggaattcatgattttctttcttggcgtggtactaattttaagagacaagcagggtctgtttacttcaagtggcgtgcattaggaaattcagttgtatttgctgctaactttccattaggatactatacaggtcagattgacttggcttcaaagaaaaatttaaaggattttgttaagaatcgattggacaaaggcattgaatttgaggctaagaatggtaataatgatgaggttttaatcccatcaggaattgaccagatgaatatagttcataacatctctgatacggttaaaaagattaatcaatatagcaaaaatgatgttcaaattagtacgtaccctgaatttatgaaacggcttcgttcaaagaaactcaatacttaccagggtgaattgagatatccaacttattcaagagtgcatagaactattgcttctgttagatccagaaacaagcgcaagaactttaagcttgaacaagatatcttaagacgagtagagcctctgatgctgatcgctaaaaagtcgagtattcaagtttccaatggattattgattaaattatggaagcaattatttgattctcaaccacacgatactttaggaggcagtgtaactgataacgttgcagttgatattgatcacagatttaagcaggcttttgaaattgctgatggcttagaaaactatattaaaaagagaattgctcaacgcttgaacttaactgataaagatgtcatagtttttaatactgatccttatgattttgatggttataaattaattacgttcatgtcagcttcaaaaaagatcaaatttccagataaatatgaagctactttggttaaagaaaaatatactccaactcgaccaaatatcatgcaattgacaccaaacggctttgagtttaaagatgagcctggatactacaagctgtatgttttaattaagcttagaatgaatggcttgggttacaaggtaattcactttgaagacgctgatcaagaattaactagtttgcaagagctggacaataattcaattgccaatgatcaactcacagttgtttaccaagatggcaaatttactttgagagataagaatcaagaatattatgatgttatctctgtctatgatcaggcaaatgatggcgatacgtatgacttttcaccactaagaaaggaccacgagattagacttaattggaatggaaaactaaccaagaaagaaacctcaacctataaggaactgattttggaaggtaaatggttattgccttacagtctggatgatcgtttgaaagaagatgggcaaaagaaagaagtcccattcaaattgactgtttccctaaccaatggcgaaaaggtattatcctgtcgtctgcatataaacaatactgtgctggctcatcgtttaagattgagaatgaggtcaaggatgcaaactgaatatgctcatactcaaattcaaggcggtttcagaaagactaagaatgagccaatagatgataattggaatgatgaatttgtagaaaagccagttaatatttatatttttgatcgagctgtgggccaaaatgacggtaaaaatggtctctacttctttggcaaaggcgagaaagaatatgagctagttgatgattctatctatgtaacattaatggcaacgactggtcaacttggtaagtcaaacttattgtggcggccaggtcgtgcttcaggtgataccacttcagtgggacatgtcatgacgccaacaccgatggcagaagaacttggcaataacgattttgagtttggcattactccatttactggagaagagttgtctgaaaagaatattgccacacgtcttgataaatggcttagtccaaatgtttcttaccaaattcaaaagtacaatttgtttgtaaatcgtttggataacaagatctgggacattgaatttccagataatctgccgaagatcacagatgaggaatcctacttagaccttaacttactagatggtattgaagtttcagcactttatcctgcttatactatcaaggatacgatggtattgcgtttgtccaatatgactagtgaaactattgatctttcattcttgaagaaaaagggctatattaagacaaatgctctggaagaagtggatcgctctgactacaaggtaggcccatacgatatgaacacgtttattcggaagatgtaataaaaaagaatatttagtaaatttatgaccaacatttttaatggatgttggttattttttatgatcccggatttatgcaacactaagtgttaaacaaaaaggccatgaagacctgaacttgaagtgaccaaaaatcaagaaaggtgatcttcatgactaattcaaattctagcgtctctagacattatcatcaattaacaagtgagcagcgtggacaaattcaagctatgcttgattcaggcataacctcctgttccgcaattgctcgaaaggttggctgtcacaaatcgactatcagccgtgaaatcagacgtggtagcgtcctgcaaagagatcataattatttactctatgagcattactacgctgatattgcacaaatctatcatgataagcgacgcagaaactactataaacgggatccattaaagcattatgctgtttttttgagaatgctctccagacgctttaaagctaaatttgatgccaccagcattgatgaattcgttggtgaattcaaaaggactatgccaggctacccttgtcccagcacgcctactgtctatcgtatattgatcagggcttggtggacataagcaatattgatctgcctatgaagctcaaaagacgcaggaacaagcgtcatcacagccatggcggtcacgctttgcacaagaagcatcttggcaattccattgaacagcgtcctaaggaggttgaagacagaaaagctccgctgcactgggaaggagatctggttaaaggcatcagacgcaagaatcagcctgctttaatgactttgactgaaagaaccacacgctttgaagtagttatcaagattcctgactatcgggcaagtacatgccaaaggctgcttcaaaaggagattgacagacatcctgactggtttaaatcaatcacgtttgacaatggctctgagtttgcggatatgaccaagatcaagggctgccagatttactttgctcacccatattctccatgggaaaggggcaccaatgagaactgcaatggtcttttgcgtcaattcttccctaagagcaagagcatgaaagacaagtcaaaagcttatgttcaacaggcaactgatgccattaaccacaaatatcgccgaatcctccaatatcacacagcagaggaactcttcaagcaatatatttcttcatagcctaactgttgcacttaatttgacaattcaggttgtttttaaaaataagaatatgttttcaataagccctaaaaccttttaaatcaattgcctagcgcttatgatgaaagtgtcttaaggaaaggtacctacttagacaaaaagtaactcattaataattcaaaatagatgagtgttagaccaaaaaacagctgagggtaatgactatcaaaggatgatggagtaaacgtatctgaactgattacaagtgatgagtttttagcaatagttgaattacggtcacctacgaaagagagaatatctctattattctgtttagcatgaatgcacagttctgctaaacgtttggtttctccagaattgctgattactattattagagcgtctttatttttacggagtaattcaagatgtgaatttgcagtacatctaaaaccgtataaatttagatactcactcatatagttagcaatattttgagaaaagccactgcccaatatcatgatcattgagtctttatgcttatccatcaaattggagaaaggctttacgcaagatcttacttttaagtcattttcagtattattagggaactttggtgtatctgtaattagaaagaccaattatgaatatcctgaaagtcccatctttttacaggtcttgacgataaagctgggagaagtgaatgttcttttagccagttcgcgaatccttagatttttcagctctgaacggtgatcgttcatataaagaaggatcttttcttcatctttattaagttgatatttctcgcagatggtttgaatattcattgtatttctcctcgtgtgtcaaaggaaggactcattatgtcagaaaatgatgttaagaaaaacgaagtgccacaaaacagagatagagaatttttagctgatccatgggcaagaacaagaacacgtaatggattagctgcggatgaagttatctctgccttacaaaaatcgattcggaaaggcaaagaaagggctgcctgtgaatttgcttatgagatgtacatttcatccccacaaatggaagaaaaattatggcgtcgtcttcaagcaatttcagtagaagatatcggcatgggtaatccaaaagctccaattcttatcaatagcttaaatcagatgcgtcaaaactttagttacaacgaaccggatcgtgctatgatgtttgttcacgctattcgctatctgtgtgaatcaactaaagaccgttcatcagatttgcttaagaacattataatcaaaaactttgctttaggctatgtccctaagattccggattatgctttggacaagcatactacacgtggcaagaagatgggaagaggaagtatgcacttccttgaagttgattcaaaagttacaccgcaattaaaggtgaataatcattattgggacgaatatcataagattcgtgaaaactgggatgacagtaaggtaattccgaacgcattcaagttcaatccatatcaaatttaattaaaaagcgttttgttttagtaaagaaaataggtgatttctgatggccgaaactactgctaaaaaagaatcactgattactaaattggataaagttttaacgcctattggacaaaaacttggaaatgaaaagcatttacaggccatttcaaatggtatgcttttcggattgccatttttggtaattggttcctttttcttaattgttgctaaccctccaattgttatggataaatataatccagcaacagctaatttcttcatgaaatggattgctgcctggaaatattgggcagtcgctcattatgctcaaattactattccatataatatgacaatgggtatgtttgggatgatttgtgcttttggtatcgcatatgaattgagcaaaggataccgcagagagcatccagcaactgatgggatgatttcgttagttactttcttaatggtcactacaactgttgataaaaataataagatcgacattaataatttgggaacgaatggtttatttgttgcaattattattggactacttgcagttgaaattaatcgtttaattgaaaaaagtaattttaagctcaaattaccagattctattcccccaatggtagctaactttattaattcgttgattccattactggttaatatctttattttctatggtgcagatctaattctagttggaatgactcatgcagattttactacctttataatgaaatgcttaactccagctacctttttagctaacagcttatggggttacattttgattgtgactctgggtaatttgctttggctaattggggttaatggtagtaatgtcattttcccaattgtatttgctacaggtatagcagcaactggtgcaaatgctgcattagttgcaaagggacttgctcctactcatttgatgaatttgcaaatgttcagaatcgctgtcttaggtggttctggtaattcgttggctttgtgtattcttatgatgaatagtaaagttgaaaagtaccgtgcacttggtaggctttcaattattccaggcatttgtagtatcaatgaaccaattatttttggtactccaatttgctttaatcctattctaggaataccgttcttgattgcaccagttattaacattgtgttgacttactttgctgaaagtcttcactggattggaatgggttatattgttgatccatcgtttactccattcttcttccaggcttacatgagctcgatggattggagaaacattatttttgagtgtattttgattgcaataggtattgtgatttatctcccattctttagagtggccgagcagaatgagctgaagaatattcctgcggcttagatgtaaaaattaaagacgctggcttgtgtgatatagtcctactttagtagacagtacaaatatataaaattgtactatctatgaaagcaggactttttgtttgataatattttggtattcccctccctgcttaaaaaatagaattcaacccccaaaaaccaaatccaaccggcaaaaagaatgcaatcgaggcgtaaatatgtgaaaatgtaattgcttacagcatttttcgataataatgaaggagtttttccatgactgaagatgcaaaactaaaacaagtaattaacaaaatcgacagtgcaatcggttggatttacagcctcggcagcattgtccctaattcattgagcgccgaacttaatcctgatgatgacagtgttttgatttacttacagacacctaacaacttgactattcctagcctgctcttgaatgatcagacttatggctacattcttgaacaagatgatgcttctaacggtgaggggattatcgttagcttggctggcagttttatggacgcaacgaagcctgaagagcgtgtggatcttgatcctaagcagctacgtcaggatatggattatctatacaacgcttggtatagattgacgcaaaaaaatgccgaaattaacagctattaccgtgacacggataaaatgtccacggccgatgtgcgagaaaatttgcagagcattttagcagctagtggtctatatggggcagatattttagcccagactgaaactcaattagcccaaatgcctgacgcttatttattggcgattcctaaggaagtgcaacgttcaactgatgatgacgaagcagctggtcgcgtggtctatcatatggtaatggagatcccgaatgattcgtatctgttcaagccagatcctgatttttctctattaaaaaatgcgccggataaggctgatcaagccgtgggtaacaatgaagatagcaatctaataggcgatccgattgaacgaccagaggctgaaaaattggctgctaaattccgtcaggctagtgaagcattggtgcaaaataatctcatccctgcagattcttttggcgtggaatatgacgaagagcagcacgatttgattgtgtatttgcagtcgcctaatgatgtgatgatttttcgaaatgatattctaggtactaagattgcaacaatgattgaaaatgagagtgtagagcaatgtgcggctcatttagccatttcgtttatccttaattttgcccgcgatttgcaagatacggcaggtcagattagtgatgatgattgggacgcttattgtgccgatctggattacttgtatcgcttagttttcggcttttcttacagcatccctgacgtcgatggctacttgtctaacaccaatgaacggacgctagatgatttgcggcaaaagctgaatagctacgttcaagctagcgacaacgaagataaggatcaattaattgagattatcaacaagttaggctatggctatctttacagcttgatggcttatattgactcaatcagtgacgatcaagatgcaaatgtaatcactaatttcttaggtcattccctgatttatgtacctaatcaagacattgatgccggttttactcctgacccgaatttctctgttttggatgaaaataatccgcatgatacctggcaaaacggttcaatcgtcatcgacagtgatcaaggcgacacctcaggaattgtagcaaaactataccctaagattcagtctgccgcaggaaatttaaccaaacgttgtgattttgagcctggttcaattaacgttcaatattctgctaagcaaggattgacaggaattttgttccagacaccaggacgagttttgagcccatcttttgcctggaatgcacagaatgcagcacaattagtcgatatggaaccagagcagttggagacccagttgacacttgattatgtttttggtgcatttggtgaagcaatcgatgatttagctaatgaaatccgcaagaatcaaggccagttagaccaggacagtcttgaacggattaatgttgatttggcttacaattttgaacgagttactaagctgtcacatacatacgccgacatggatccagcactaaaggaaatgatgggtgacgattatgcagagagaaagatgcgcgactttttgactacatcaatggtagtagacgataatgatgccgcttatcaggttgatggtttgctgattcgggctacatatgcacaggtctttgcactgtatcgtttaatgcatgacagcaaattattggaacctaaggcaactaccttgcttgacatgttgaagcatcagccagaacatccaattaagtttgacgtagttgatgatgttgatttgtttgataatgatcatgacgatgagtaatttttgagggagaaaaatgattagaagagcaagaaaaacagattttccttttgtatatcccatcttaaagcaaatttttgatgaaatgcagatgaagtcgattgaatctttgccagaagatcaattctatagcttaatgaaattagggttcatttccgaggattatcgctattcataccgccgaatttgggtagctgaagatcatggtaaggtgaccggaattttagatatgtatccttataaggaccagaagattatcgatgttgtcttgcgccataactatgcaaatgctggtttactcatttcaaccgtgatttttgatgatcaagaagcttggccacacgagtggtatattgatgcgttagctgtacatcccgaccattggggtgaacacattgctagtcgtctgatggacgaggcagaacaagtagcgttagctcatggctatcatattatcagcttaaatgtggacaaagaaaatccacgtgcgcaagctttatacaagcataagggttatgaaattgaaaaatcgatgacgattggcgatcgtacttatgaccatatgattaagaagatttaagataaaagcagtattcctaaagcattggctgaaagaatgctgtttttatgtttatccaaaaaagtgatattcaattactaaaacactatcttccactaaacccgaacaatttatagtccatatagacaataaatgaacaaattatgcaatttaagcactaaaaagctttaaatcaattcaaaatcatgctagaatcggatcattggtaaaattatgaattcaaagggtagacagataatgaataacgacattgagaaaattttgtttgatcaagcacaattagataagcgcatggatgagatggctgctgaattgaatcaaaaatatgagggcaagcagccgattgtcattcccgttttaaatggggcaatgatttttgctagtgacatgatcaagcgacttaactttaaattgacagttgatccaattaaggcttcaagttatgccggtaccgaatcaacaggcaaggtaaagatcactcaagatataaaatctgatgttaaagatcaaccggtaatttttatggaagatattattgatacaggtcgtacgcttcaagctttaagtgaagtgatgaaggaccgcggtgctgctagtgttgaagtagtagcgatgctcgataagccgacaactagagtagttgacttccatgctgattactatggttttcaagctccagatgcatttttagtagggtatggtcttgactataacggcttatatcgtaatttaccttatgtcggtattttaaaacgtaaaatttatgcttaatgtaaaaagttgctagtattcgttgcaatgtcattaagttaagacattgacaattaatattagacttttaaagcactgatttaacatttaattggttaaattggtgcttttttcgtacaacaaataaggcatagcacagattctgcttttttaagctacgcgatataaataatatacagctgatttgggcttaatatttctcttgtccttgcggcctggtctaattggaatggtataatagctgatctgaataaggatccgttcaaaatcttgcgttaaagaagaagccaaatacatgctctgaataatcaagcatgattgcttgaaattgatggcatattgatacttgcaatgcttttgcggaatataggcctgtgcatcaatttgactgattgcattaaacataatcatatgggcataaatttccatttcaataaatttatcttgtttggaatggaactgtacactgcctaaagaatacttcaatttcttgaaggaggtctcaataccccaacgcagatgataaagctctttaattctttttagcggataattttttcgatcaagattggttagcacaacttcccattcttctttgcctgatttggcatcattaattctaaatttgcaggctcgaaattttattgtgcataactcgccaaaatcccagcttagatcctgggtatttttagagcgatacttaatatattggcgataatgatgctggacatggtgaatattctcactggctttatgcgtgatgtagtaatagttagaagtagttaccaggcaggaaatctcacgatcacattcttgatcaggcaatgtcgttatttctttaactccgccttgtccagccttagttcgtattatgtaatgacagttaggcaggcgattgcagttttcaatcatattgaaactagtgtagccacgatccattgttacaatatatggaccacaattcaaagctttaagcatttgaacagccgctttgcgttcatccatttctgatttaggctgaaaaatacaatcctggtaggtattattcaatagatcatataaggcattaacgtgaatttgacaatagggtttctttttatgagaagaagcttgtacaatgttattcgatttcggattccagatttgattaaagtcagagccatcaatggcaaacaaacggtagtgatgatcaaaaagttgaatattaaatagattttgattaaaaacagtcagaatatgtttaaaacaagcaggagaaagctggcttttgcgttgaacataggcagaagtactaactactttatcgttctttttagttgcatcttcgccaaaagctctaaagagttcactgtttaaattctgaccttgcatgttaattgtagttttaaggactgtcgctgcatctaaagtgcgtttcctggtaaaagcatgaggattattaataaaatcgtgaatatgatccccagtattattgataatttgatcaagacgttctagaatattcttatgaagggctttcataattaacaccatctttctggcaataattttgaaggtttaaaatatataatatataagataggcgaaaaggctggtcttttcgcctttattttatacaaaaaaagagatcgaatccaaatgattcgatctctaaaaaagcacccttaattgtcaatgtcttaacttaatgacattggtattcgttgctagcaactttttttaatgtgatggagaaaaaggcattcaacgtcagtataaactgtgatgacattgtcctgatagtcatgagcaatccagtctagaattcgaataagaatcaaactggaaatgctttggatatgcttattagaaagattactattgaatagcaatttttgcatttcacgaaaaagagcttggtcaacttgtgttcgaatttgacttgaggcaagagaatgtacatttcgatagtaggtggcattagtttcaatttctatcagtaagttgtgtgcttttttatgtaaagtacttgattggggattgttgaagcaagaattgatttcgaattgcagtacttgactaaatagatcattcaaatttttaaagttgcggtaaaaagttccgcgacagatatttgcagcttcacagaatctttgaactgaatacttgtaaacagttccttgtgataggtctttttttaagacttgtgcaaagaattggatatgtatcctgtctttcctagtttttcttcttgtagtagtgaaatacatctttatcctcccttttttatgttcattgaacatattgatatagaatataccagttactatttaatatagcaatcctttttttagataacaataatgtaatagattgtgtaagcgaaaatcccgcatggataacgtaaaaatgcttttgaaaaagtttattaattgtaatcataatttgctgtactgttgttaattatgtacagttattgctggaaacattgatttatcaaggattatagacaaaatagtaataagataataacttaacacactattagtattagctaatgtatacaaacaattagatagcttaattgaaaatgtgtgaatatctgcatttttttgacaggattttgatgaaaaatgggcaaaaataaaagagctcaaatagttgactgaactacttgagctcttggattaggaaactgtattaagtttttaactacagcgttagttttaatgattgaattttctgtagttttggatgtaacatttagcaacacccatcatgtgaacactaaccttgcttgggtcaccctttaagccactgaaactaataccaaagtatttagtcttagcatcgtagctcttagtacggcaaccaagtaaatcaccagcgtgttcccattcagtgtatctagatgagtcattcatctgactgtcagagcctgcaaaaccgccaaaaagcatttgctttacgttaaagtaaatttggtttttcaatactgacattggacgtaagttagtattgtatgttgaagagataggtaagccagcttcatcttcgtagacttgacctacttttgagttaaggccagaagccttagctgcgcgttcaattccagtaacatagtggtcggcatcccagcaagatctgttatggctgtagtattcgttagctacacgatttgcaaagtgcaaagcacctcgtttgtaagtccagccttgcttgccaagttgatgacgtgcagaattaattaagcttaaagtgtattggctcagttctttttgttgagacgcagttaatttagtcacgttaactaacgtattatctgaacccgcatcactattggtgttttccttcatgccttttttagaagcatcaatcaaagccttacttgctttaccagtttggttccatttaataatggcactcttggtgtaaccagcaggtaatgtgatagaagcagcttgaacagtagagttgttattatttgaaatagcaacacttccacctgctaaagcggctgcgataccgataagtgataatagcttaacattctttgtcatttttcttaatccccttatattacgaaaaggatttccaatttataagtcatttttttgcttaaggagtagtcaattccttaaagctcgttatatgtctcttcatggaatgatactaacattattaaaaacaaagtctatacatgaaaagctttaataacgtatcgtgttaaataaaaaacatggatgttatttttttagagtactagtttatcaagacttagggcgacctaaaataaaaactatacggttaataaataattcgaaagttttttgataaaggctaaatttatataaaaaaatatataattataacctaagttatctgtaaattatcaagtactaatgactaagagttgggataaaatcagcgtttagcaaagatatgttttaaaaatattatattgtatagaaaatagcagaaagatattaaaattataattaatttcaaaattacactacaaaatatggaagtgaaactagtttgagtcgtattttgtaattaaaacgagactgtaaaatagtttgtgtaaggatgaatgattccttaaatttatttctttaaacattagaaaaaggagttcctttctcgtatgattggtttgaacaaaaaaacacatacagaaagaagaactccttcatgaatgattttaccaaagattttgctcaagctctattcaatccagacaaaataaatgatttattgcgcaaagagctacaacaggctgttaataacttgttagaagctgaattgactgcctttctgggctatgatccctatgccagaaatggctggaatactggcaactctagaaatggtgcttatttccgcaaagttcatacgcaatttggcccaattgaagtgcaagtgcctcgggatcgcaacggtcaatttcatcagcacacgctgcctgactacaagcagcactcggatatcttggaaagcatgattatcaagctttactccaagggcgtgaccaccagggaaatagccgatctaattgaaaagatgtatggcagccattacagtccagctcaggtatcaaatatttccaagcagatgattccaaaggttgaggcttaccacaaacgcaagctaagcgacaagtttttctgcgtctatttggatgcgacataccttcctttgcgccgagaaacatttgagcgcgaagcagtctatattgccattggcatcaagcctaatgggcacaaggaggtcattgactactgcattgcgcctagcgagaacattgaagtctggacagatatgcttcaaaacatgaaatcccgaggcttaaagcaagttgagctttttctttctgatggtgttgttggcatgaaaacagccttggccaggacttatcctaaagctcattttcaacgctgtttggttcatgtcatgcgcaatatctgcgctaaagtacgcgtcgacgatcgtgaaaagatcatgaacgaattcaaacaggtgcatcaacagacaaacaaagaagaagccacagctgtcctgcatgacttctataccaaatggggcaaggtttacagccatgttatcagaagcttgaaagacatagaaccagatctgctggtcttttataactatcccaagcagatcagagcttcaatttattcgactaacatgattgaatcatttaacaatgtgatcaagcgcaaagctaagcctaaggcagagtttccaactgaacagtcgcttgatgcttttattggtattcaggcaatgagctacaatgaccgttatttcaatcgaattcataaaggctttggtcaggttcaggacaccttagaatcctactttgattaaataaataattaaaaaatcaatttacgagaaagatctatttacacaaaagatttgacagtttcattaaaactatacgatcatcaaatacggactatttatttttgtggttaaaggaatgttcaaattatagtttatcttggtcatgaaacgattatttttttcatttttacactattactaataaaggcaagttaaacacctgatttgttaggcttaaggcaaaatttaaaaatatttcgcgtagtgaaacgcgttccaaaacttgaaacaaagtctgaagctggtgaaaacgaatacatttgtgggagaagatgatataaatatatgcgtaaggcaaatgaaacagagataaaaacttagttttatttaaaggagaaaatagattatggatggtaagaaatattcagtagttattgctggcggtggtagtacttttactccaggatttgtccttgatttaatcaagagtcaggataaattcccattaagacagttgaagttctatgataacgatgctgaacggcaagaaaagattgccaaagctgttgaaattatcatgaaggaaagagcacctcaaattaagttttcttacacaactgatcctaaagaggcctttactgatgtagattttgttatgggatcaattcgtgttggtaaatatcacatgagaagcttggatgaaaagattccattaaaatatggcgtgaatggtcaagaaactactggacccggaggaatggcctatggtcttcgctcaattcccgcaattttgcaaattattgattggatggaagaatactcaccaaatgcttggatgatcaactactccaacacaattgcaatcgttgcagaagcttgccgtcgtcttcgtccaaatgctaaggtaattaacatttgtgatatgccgattgatgatatggacagaatggctgccatttgtggtttggacagttggcatgatattgactttaactattatggtttgaatcattttggctggtggaaagaagttcgcaacaagaagactggcgaagacttaatgcctaagttgaaggaatatgtcaaagagcacggctattgggtaggtggcgattacgacaaggatactgaagcttcttgggaagccacctttaagaaagttgccgatgaatataagctagagccagaaactttgccaaacaattacatgcaatactactacttcccacaatatgaagttgctaatgctgatccgaagcatactcgtactgatgaaattcgtgaacaccggcaaaagattgtctttggcgaatgtgaaagaatcgtaaaggtgggaactgctaagaataatatttgggatatttcaggtttgcactctgaatatatcgtagatatttgtcatgcgatcgcatttaacactcatgaaaagttcttagctaactgtgctaataacggtgcaatttctaatatggatccagattcaattgttgaagtaccagcattgtttggtgctgatggcattcaaccaatggctacgggtaaagcaggtcgcttccaaagaggcttgatgatggaacaacaaacttgtgaaaaattggttgttgatgcttatgttgaacattcatacaataagatgctgcaagcatttgcattaaacaagactgtaccagatgcttccgttgctaagaagattttggatgacatgattccagttaatgctccatactggccagaacttaaataattaattgtcataacataacttcaattcaagaataaaaattaaggtagttactcaaatagggtggctaccttttttgagtacgacatgatattcttttcttaataagaaacagtgatgagaaaggaaacagaatggatttagaaacagcggtcatgaagaaaaaggaaagttttaatgagaccgataaagcgatcgttagctatttattgaaatatcctgaagtagcaagtcagttgagtttgctggaattagctcagaaattatacgtttctaagtccgctatttttcgcctaagcaaaaaattgggattaagcggtttcagcgaattgaaatttgaattgtccgagttagctacacgaaaggagcaaaacgttaagaacaagcaaacgctagatttcaatacggatttacaaaagatcattgctgaaacttttaaatattttaagggattaaacttacaaccattttttgcggatttagatcaagcggaaacgatctatctttactctactggctggcagcagcaaattatcgcggaatatttggcgcataactttttcttaattggtaaaaaagcaattattttgcctagtgcacgcgacgaagtggcattattagggcggtctgcacgggaaaatgacatgctgtttgttatttcatttggtggttttaataaaacaattattgaagaacttaagaagattgatgtcgtgaatactgaactgaaattggtgtcactgactagctggcaaacgggaaaattagcctctcttagcgactatagctttttcttcaaaactacgccatttcaatttagtaagcaaaatgcggtaacttttagttcggcctatgttttaattgatctaatcatgaatagttatggtcgacattgtgatttgagataaaggggaacaagatgaagaaaatattattgctatcaactgggggaactattgcttccgttgcttctgatgcaggcctagtacccaaggaaaccggtgaagagttaattaaaatgttgggaaagttgccgtacgacattcaagtccgcgatattttgcaattagattcttctaatatccaaccagaagaatggaaatttattgcagaaaatatctacaaataccgcaatgattacgatggaattgttgtttcacacggtactgatactatggcttatacggcatcaatgttgtcgtttatgctgaaaaatattaatatcccggttgtgctgacgggaagtcaggtaccaattaacgtggtcctaagtgacgctcacgataacctacggttggcttttgcagctgcagcaacttgtccacctgatgtttatttagcctttcataataaagttatgctgggctgccgcagtgtaaaggtgcggactaccaactttgatgcttttgaaagtgtgaatgtgccaccagtagcaaccgtttcttccgatggattagtttttaattcagaacattttcaaagagaacatgacggtcagccaaccttgaataccaaaattaattcacacgtatcgttggtgaaactatttccaggctttgatcctaatctgctttttgcgatggttaatagtggttgccgtggaattgttattgaagcatatggtctaggcgggatgaactttattcgccgcaacatggtagccgcaattggtatgctaattcgtcaaggtattcccgttgtagccagcagtcaatgcttgtatgaacgtagcgatttgaccaaatatgaggtggggcgtgaggctttactggaaggagctatttctgcttgtgatatgacttctgagagtgcgattaccaaattaatgtgggctttagggcaagggatggacgtccatcaaattgctgacttttttgatacaaatgttgctggagaagtaactcttaagtaaaggtaaataatattacaattatgttaattgtaagcgtagccatccccataacgatcggctttttatataataagaaatataaggagctgggaacatgaagagtacagttttacagaaagtttggcttgtatttgctgctataggaattggggcttccctttttattaataattcacatcaactgatcgaatctaatgcaactacaatttcaaacgcaattattaatacgaaataaagatgacagtcacttaggtggctgtttttttgtataataaaagaaaaagaattggatgtgaacaagatagattttgaagaagctagaaataaattacaaatgattgaagaaatgctcaatcggatgcccttgattcatggagaaaatgatgttttcaaggttactgctgatgagatggatgactttttagccagtgtaacgcctgatatggatggcaaacaagtgacggaacaaggaaaaaagattttgcacacttgtctacaagtacttaagttacggcaaaaggatgagcggctaacacctgaacaaagtagcttattagcagatattgaacagcttaattaatacaaaaatatgttaaaatggttctatagaaatcgcttacaaagaggtgcgttttatggaacttttaattgcaactcatgaagggttggctgcggggctaatgtctgcacatgatatgttggcaggcaagaatgatcagatcctgacaattgaattaaacgacacaggaatcagagattttaaggctcgttttgctaaagtcatgaataaatatcagaatagtcagattttggtgctaactgatttaaaaaatgggacaccccacttagtcgcttcggaatatgaagatatgtatcctgagcgagtacgggtaattagcggtgttaatttgccaatggtgctggagcttagccataagatgatcaatgctagcttgaatgaaagtaccgaaaaggcaattcagattggtcgtagtcagatagatgttgaccaattggcagcagccaaagtttaatatcaaaaaagacgatagtgttgtactaccgtctttttgtaactaattaatcttcaattaaattattgtcattaataaaaatatttctaaactttgcccaaccttttactaactcaacttgtgcaattgaaagtaaagctagggtaactacgattaaccattgtccagctgacaaactggtaatgtgaaatgcatcttgcattgctgggacaaagagaataatacccatgaaaaatgcagagataatgaatgacactgttaaccatggattattaccagatgatcttttccagatgggatcagtatttgaatgctggttaaatgaacgaatcatttgggccaatgctaaaatactgaaggccatggtttgtccgacaacttgattgccggtttctttaccaatgaagtaaccagttaaagtaagcagggcaacaaatattccttgggtaataacccgaataactaggtctttttcgaataaagtaccagctttaactggcttgtgtttcataatgtttttacttgctgggtctacgccaagagcaagggcaggtagagtagctgtagctaagttaacccacaagatgtgtactgccaataatggcgcatcccagttaaaaatagttgccgcaaacaaagtggtaatttcagcaatgttaccaactagcaagaactgaattactttttggatgttgcggtaaacgcggcgaccttccttgatagcgtgcgcaattgtggtaaaactatcatcaagcaaaatcatatcagccacgtccttagccacgtctgtacccgttacacccatagcgacaccgatatcggcagcctttaaggcaggtgaatcgtttactccgtcaccggtcatagctgttacctcacaatttcgctttaagctttgaatgatgcgcagtttgtcagcaggagaaacgcgagcaaaaacggtagccttttcaacagcttgatctaattctgcatcagacatttggtctaattcagttcccgagattgctaagtcacctgtctgataaatgtttaactttttcgcaattgccaaggcagttaccttgtggtcaccggtaatcataattgtgcgaataccggcttcacggcaggttttaactgatgctgcaacttcttttcgtggtgggtcaatcatgccgacaatcccgataaaagtcaaattattttccaaatcagcatttgcttcaggtaagttatccactattttggtagcaaagcctagtactcgtaaagcgtcagcttgcatttggtgagacaagtgggcaatttgctttttgtcttggggtgtaattttacgcacgccattgtcagtcataatgtgtgtacataacggcaacatttcgtccgttgcacccttagtgaagaccgttaattgaccgtcaattttgtgcaatgttgtcatccgttttctgtccgaatcaaagggttgttcgaacaaacgggggaattctttctttaagttagattggttaaagccaagcttttgggcaaaaggaattaaggctacctcagttggatcaccaatctctttttcaccgttcaagctggcatcgttacaaagagcgctagcataggccaaagtttgattggttttgtttgctgcaagctggtcaactacgtgactttggctgaagtcattcgttgctgcctgtgtaacagtcattttgtttaaggttaaagtaccagttttgtcggaacagatgacagtggcgttacctaaggtttcgactgctggcagctttttgatcaaagcgttacgcttaaccatgcgtttaacgcctaaggccataacaattgtcgcggttgctggcagaccttctggaataattgaaattgccaatgagatagcaaccaagaattgtggtaaaagtggacggccatagaaagcaccaattgcaaagaccaaactacaaataattaagccgatagtcgttaagaccatgccggctttagctaatttgcgtttcaatggtgtttgtacttcagtttgatcttctaacatgccagcaatggcacccatttctgtttgcatcccaattgctgtcacgacgccttgaccacgaccataagtcacaattgaggaagaaaaagccatattgatgcggtcaccaagagcacaatctgaatttaaaacagcagctgcgtctttttctaccggtactgattcaccagtaagggatgcttcttgaattttcaagttagctgtttcaattaagcgaaaatcggctggaaccatgtccccatcatgcaaggtaacaatatcaccaactactaattccttggccggtatgattaattctttgccattacgaattacatgggcagttggcgcagatatgtcacataacgcagctaaagaagactgtgccttcttttcctgaactactccaataatggtattaagaaccacgattgtcgcgataataatggcttcggtatattcgccaaacatagcagataagagggcagctactaataagataccgatcattggatcaaaaatctgctctttgaccatttggattactgttttaagaggtttagctgcgagctcgtttaaaccagcttgctggcgtattcgaacttcgtcttcagttaaaccagtttcggttgtttttgtatttgttaatacctcagactgttcgacagcccaaggtttttgcctgtgattatccatagcggactaaccactcctttcgtaaaaaaataatggaaaacgacctactagcataagccgttccccatttgagaaacttgttcagttttcatttgcgtatcggcagcgtcataggcgcttctcggtatgtaaattatataatatatagtttatcatattgtgacatagtgtcaatatgactaatcatggtgaaagagttctttaatttttcttaaccaattgtctttagtggaaggagtagttttcgtttgtgactcagagttagtttgctctatatgctgtttactggaaaaatgtttaacatgtttcgccttttttggtgcagatgcggactgttttttcttagtattttgatgatcatgcaatttcattatttttggttgcttattttggcgcacataataatggtcttcatcagtttgtgcttccatcgcaatatcgggacgcaaataatataggtcttgaccgtcatagctgttaattaaaaagacaagaatatcgtgtaaatcacaaatacagtgccaggcttgcttttgatctggttcaatttggttatcgtggacagcagcgttgcccatgcagcgtatttcgtcaaataaatccatgatcgaaagagggtaatctagttcattgcgtaaataatgtgtattattacgcaaattacggtgttcgccatcatgaactgtgtaatatggactgagattttctaacttaaaaatttttttgattagactctctaatagaagacgtgaatttgaaataacgtcacgataatcatcaattgtgtataatttgtggattttttcagcggtaggaaaggcttccttgaagctgctattttttacaaaatcaaaatttacttccactgtgcaatcccctccaaaataaaataatgctactaaatataataagaacttcgtcttgatttgtgaacaaaagatgtttgctttttttgatcaacttgttaatctaagttaaaaggatttgtgaaaaggtgttttgatcaatgaaaaaacataagaaaatttggatatcgggagttattatcctgttaattggtattgcatggctaattggcaatttttattacactaaagaacgtcaaattgaccgcattgtagctaaaatgcaggatcctaaaactgagctagctcagtatgtcacggcttcaacgcctgatatggatgtgacagataaatcgctgaagccgcttcaaaattactttaaagagcatcacagtgcagctaaacgtttagcctataatttgcgtcataatcgcgatcatggtgaaatcagactgattcaagatggacgcaattttttgctttttccaaaatataagttgtggatacaagtatatcgcccacaggtgaagaccaatcacgctaattcaactttgacggttaaccaaaaggattatggtgaaatggaaggtggcaatcagaattactatcaagatttaggtatggtctttcctggtcgctatcatatattagttaaatctaaggttaatggtcgccatttagatgctgattcgattgttaacatttggtcagataagactgttgatatgaagatcaaaacggccactttccaagtgcgcagcgttcctaatggtacgatctatatcaatgatcgtaaggcgggtaaattgaaccagcatggtagctatactttcaaggattatccgattgctaagcgaatggaaatctatattaagagtaaggcagatggtcaaactattaagtccgaaagggtaacggatttgtcgcagtcgattagttcagaattttctaatagtgaggatgacgtcactgattatgatggtactgctgaatatcaaggcaatggcgaaaaagatgtctatcaggatgcagaaggtgactatattgttaacccgatttggcctggcttgattaaggttggggatgcagctaagctattgtacaacacccttaagtcgccaaatgcagatgactttgaaaatggaaaagaaaatgcagactataagaagattgctaagcaactaaaggaatggcataaaaagaagagtatcaagaaattaagtgtaaagatcaaggtgctctctgttttaccaggtaagcgtaattatagtcggattaactatgaagtaacctttattaaaaagtataaagataagagtaaaaagaaagaacgattgtcgtatcaaaacgctgttttccaccaaaaagatggcaaacaattgattcagactttgggcgactgtaagttaataaaaactaaaacaagtgactaaagattagttagagtaagacttcctactgttaaaaatagtaggaagttgagactgtaaaatagtttgtgtaaggatgaatgattccttaaatttatttctttaaacattagaaaaaggagttcctttctcgtatgattggtttgaacaaaaaaacacatacagaaagaagaactccttcatgaatgattttaccaaagattttgctcaagctctattcaatccagacaaaataaatgatttattgcgcaaagaactacaacaggctgttaataacttgctagaagctgaattgactgcctttctgggctatgatccctatgccagaaatggctggaatactggcaactctagaaatggtgcttatttccgcaaagttgatacgcaatttggcccaattgaagtgcaagtgcctcgggatcgcaacggtcaatttcatcagcacacgctgcctgactacaagcagcactcggatatcttggaaagcatgattatcaagctttactccaagggcgtgaccaccagggaaatagccgatctaattgaaaagatgtatggcagccattacagtccagctcaggtatcaaatatttccaagcagatgattccaaaggttgaggcttaccacaaacgcaagctaagcgacaagtttttctgcgtctatttggatgcgacataccttcctttgcgccgagaaacgtttgagcgttgagcgtgaagcagtctatattgccattggcattaaacctaatggacataaggaagtcattgactactgcattgctcctagtgagaacattgaagtctggacagagatgcttcaaaacatgaagtccagaggcttgaagcaagttgaactctttctttctgatggtgttgttggcatgaaaacagccttggccaggacttatcctaaagctcattttcaacgctgtttggttcatgtcatgcgcaatatctgcgctaaagtacgcgtcgacgatcgtgaaaagatcatgaacgaattcaaacaggtgcatcaacagacaaacaaagaagaagccacagctgtcctgcatgacttctataccaaatggggcaaggtttacagccatgttatcagaagcttgaaagacatagaaccagatctgctggtcttttataactatcccaagcagatcagagcttcaatttattcgactaacatgattgaatcatttaacaatgtgatcaagcgcaaagctaagcctaaggcagagtttccaactgaacagtcgcttgatgcttttattggtattcaggcaatgagctacaatgaccgttatttcaatcgaattcataaaggctttggtcaggttcaggacaccttagaatcctactttgattaaataaataattaaaaaatcaatttacgagaaagaactatttacacaaaagatttgacagtttcaggaagttttttaataacagtgaagctatataaaaatattgttttgcaaaaataattaaacaaacaaaatcctgaattgtcaaattaagtgcaacagttaggctatgaggaaatatattgcttgaagagttcttctgctgtgtgatattgaaggattcgacgatgtttgcggttaatggcatcagttgcctgttgaacataagcagctgacttatctttcatgcttttgcctttagggaagaattgacgcagaagtccattgcagttctcattggtgcctctttcccatggagaatatgggtgggcgaagtagatctggcagcctttgatctcggtcatatccgcaaactcagagccattgtcaaacgtgatcgatttaaaccaggcaggatgtctgtcaatctcattttgaagcagcctttggcatgtgcttgcccgatagtcaggaatcttgataactacttcaaagcgtgtggttctttcggtcaaagtcattaaagcaggctgattcttgcgtctgacgcctttaaccagatctccttcccagtgcagcggcgtttttctgtcttcaatctctttaggacgctgttcaatggaattgccaagatgcttcttgtgcaaagcatgaccgctatggccgtgatgacacttgttcctgcgtcttttgagcttcataggcagatcaatattgcttatgtccagcaagccctgatcaatatagcgatagacagttggtgtgctgggacaagggtagcctggcatagtccttttgaattcaccaacgaattcatcgatgctggtggcatcaaatttagctttaaagcgtctggagagcattctcaaaaagacagcataatgcttcaatggattgcgctgatagcagtttttgcgacgcttctcataataaatctgtgcagtatcagcgtaatagtgctcatacaataaatagctgctgtctctttgcaggacgcttccgcgtttgatttcgcgactgattgtcgacttatggcagccaacttcttgagcgataacagtacgggaagttatgccggaatccagcattgcttgaatttgtccacgttgtacgctggttaattgatgatagtgcttagaaatgctagaatttgaattggtcatgaagatcttcctttcttgatttttcgtcacttcaagtttaggtcttcatggcctttttgtttaacacttagtgttgcacttcaattttaaatccgggaaacaaacaaaataagattaggcccgattcgcctaatcttattttgctataaatgcattaaattccacttaggtatcttaatttcgcctttctcactcattgtcataatagtgattgaagcattcttaggacctggaaccaaaggaatatggtcaccataacgataccagagacttctaatagtgaagccgtgagtaactagcagaatgttttcagcgccatccaattgactgattaatttaaaaccatcatcaagacgagcccaatattcttcagcgttttctgcttggtgataaggatcggcttctttaatccaatccttaatagtatcgatgctctcatgagcaaacatttcttgccgtgttccgtagccgtgactgccaccaatcattcgccaagccatttcggaatccattccttcgaagtagccgtagaattgttctctgaaaaatggactagcgatgtgctgcaattcgtctttgttggcgttatatttcatgatgatctcacaggtatcacttgctctcttaagatcactagacaatgcaatgtcaaaaggtacttcgcttaaagctttaccagcttcttcagcgccttcaattcctggtgtagttaatggtgtgtcacaccaaccttgcatcttattgtagcgattgatataagtttgaccgtgacggacgatataaattcttttcatatttttctcctcgtaaaaagctcacactttattgtagaaaaaagaggtgagcttttaaagttaattattttcgtggtagatctttttaacagttttaatatcttgcggttgaatcgtatagatcgaaccctttgggtacatgactgagacattattagtgtggtttaagccaattgcgtggcctaattcgtgttcagcagtattaacgattcgattgtaactgtaaccataccattcgttttgcaaatagtaacggttcaagttgaccgtggcctttaacaaatgtcctgtagcagggttataggtagttgctgtttctcctgcggcattagtgtcgctattatcgactgtattaatgacgatttgagcgtcttttttatcatttatttggtgaaaagtaaaagcaccggtacgattccaagcgttcattgcattgactgcagctgatcttagttgagcattattgctaatatcgatataaaccttagcttcaggatttgaccatacacgattgtctgaagaatcgtcattttctgttttatctgtgtcagttttgatattagtagtctttttttcgttattgggagaaatggtcgtttcgttagttagaagttcgttaattcgatagctaagtgtagctagggagtcttgcgttgcgatacgaatattgggattgttctgataagtccaaacgccaagagcgataagagcaagcaagagaacatttctcagtaatttaaaaaatcttttcatgtatatatcaccccaatatgtcaagattatagtctctaaagttaaagttttcatcaatttttatttatatttttctcacgagcaggaaaactattatgaaagcgctattcatggtaaaatggtatgcgaatttttaaagaaaaggtgattagatggctacagccaaaactgaaaaaaacgaaaaagaacttgaacaaaagcaccttgataatattatgggtcagatcaaggaccgcgaaaaaactttaaaaaaatctatcaaatcagctgaaggcgaagcaagagagcttaattcacacttttttgacgatgttaaattggattatgatggttattccacttcaatggaaacagcactgtcaatccaccagcagcaacaattattgagtgaacgtgaacatgcttggcaacattcagctaagcagctagagactgtagagcgtttagagaagcgaccatattttgctcgggttgattttaaagaaaaaaatgaggaccgaacagagacgatttatattggtctaggttcttttgcagacaaggacgatcacttcttgatctatgactggcgggcaccaatatcttcaatttattatgatggtaaattgggtaaagtttcttataattcgcctgaaggtgaaattacagttgatatgactaagaaacgccaatttatgattgaagatggcaagattgtgaacatgtttgacactgatgagtcaatcggtgatcaaatgctcttggaagttttgtcagaaaaatcatcaacgcagatgaagtcaatcgtaacgacgattcaacgcgaacaaaataagattattcgaaacaccaaagcagatctgctttttgtccagggtgcggcaggttctggtaaaaccagtgcgattttgcagcggatagcctttttgctttatcgttatcgtggcaacctgacttcaagtgatgtaatcatgttcagtcctaaccagttgtttaatgactatattaagaatgttttgcctgaaatgggcgaacaaaatatggttcaaatgacttactggcagtttgttgcgcgacggttgccaggtatggaagttgaaaacttattcagacagtttgaagatcaaaccgcagacagcaatatttctaagtttaaggattcagttaatttctttaacttgttgactcgttatgcagagcacttgaataagcgcggtgttatttttaagaatatttatttccgtgataagaagaaaccttactttgataaggaaaaaattaaggagatctattattctttcaatgaaaattacaagttggccaaccgaattgatgcaacgcgtgaagaattgatcaagatgttgaatcgaaagattacgccagaaactaagaaggcttgggtggcacacgctattgaaggaatgagccaatctgaattaaatgagttatatgatcgacctgatcaagaatttgagtctgaggctaaggaagaggcctttttaggtagaaaaattgtattatcagccttgaagggcgtgcataagcgtattttgcacaaccactttttgaatatgcgagcacaatacctgagctttttgcgagctgtacctaagatggttgatctatctaagtggaatattgatgaaaatgattggttggctcatgtggaagaagttaagaataactttaagcagcaccatattgccatgaatgatgtttcagcttacttatatttgtatgacatgatcactggtcgcaggactgactttgagatgcgttatgccttcattgacgaaattcaagattatactccatttcaattagcttacttgaagtataatttcccacgggccaagtttacaatgttgggtgacttgaatcaggctatttttactaaggatgaaagtcgtagcttacttaagcagatctctggcttatttgatcctgaaaaaactgatgtggtgcaattaacgaaatcatatcgttcaactaaggaattgaccaatttcaccaagcaaattttgcgtcaaggcgaaaagattgaagcctttaaccgtaaaggtcctaagcctataatttggggcagaaaaaacgatgatgaagcaattgatgttttagttaacgttttgcataataatgaacaaaataagcgtacgacagctgttattaccaaagacttagctgcagctaaatttgtgcatgaagaattagctaaaaaaggtgaaaacacgaccttaattgcgactgctaatcagcgactagttgatggtactctagttgtgccttcttacttggctaagggactagaatttgatgcggtagtcatgtgggatgcctctaaagctgcttaccataaattggatgaaactcaacttgtttatactattacctctcgtgcaatgtataagctagatattatttatactggagaaaagagtccattgcttgatgttgatccagatacttatgaagaaaaataattgacaaaagttgctagatcatttaagatttattcaacattaaaaacaacttagaacagaaatagtaatactagtcaaagtaatagagagtctttgctggtggaaataagatatttgctagtatgaatcacatctgtgagttggtcttctgaacaaaagtaggaaaatccgggatagcccgttatagctaaaggttgattattgaacttattgaggcaagttgcgtgagcaatttgtaaacatgaggtggaaccgcgattacattcgccctcgtagccgtttggctatgagggtttttcttttaaaatgatcaacctagtgaggcatttctgcgtgagcaggtgcgaacatgaggtggaatcacgagcagtcgtcctcttaggttaatcctaagagggcttttttattaggaaagaaaaatgaaggtgagagtatgtcattaaaatatattgcagaaattttacccgctcttttgtcaggagcaggcatgacgttaagtatttttttctggacgttaattttagcaacgccattaggaattttggtctcattaggtgaaaaaagtaagtttaaaccattacgctggttggttaacttttatgtttggattatgcggggcacgcccttattattgcaattgatctttgtcttttatggcttaccaattattcatatcgtctttccccgctatcaagcagccttgtttgcttttgttttgaattatgcggcttattttgcggaaatttttcgtggcggcttccaatcgattgatgaaggccagtttgaagcagcgaaagttttgcgcttgagccgctggcaaacgatgaccaagattattattccccaggtaataaaaattgttttgccttcaattggaaatgaagtaattaacttggtaaaggattcatcgctagtttatgtcattggtttaggtgatttgcttagggccggcaatgtggcaatggccagagacgtaacgctagtaccgttagttttagtaggtgtaatttatctactgttgatcagtatttgtgcttttgttttgaaaaagctggaaaaatacttttcttattacaagtagttgaggtgagaatatgttagaagtaaaaaatttgagcaaagaatttaacggtcaccgaattttgcgtgacatctcttttaccttgaaagacggagaaattatgacaattgtaggtccatcaggagcggggaaaaccaccttactaagaattattgccggtttggaaacaaaagattctggtgaaattttgattgacggtaaaccttatgattcaggcaaggttggcgttgttttccaagattataatctttttcctaatttgagcgttttacaaaatatcactttggcacctactttggtattaaaaaagagtaaaactgaagcagagcaggatgcgcgtgtattgttaaaacgtctacaaataagtggccgtgaacagcagtatccttatgagttatcaggtgggcagaaacagcgagtagctatcgctagagctttggctatgaaaccgcggattctttgttatgatgagccaactagcgcgctagatccaaatttacgtaaggaagttgagaaaatgattttaagcttaaaaaaatcgggtttaacccagctgattatcacccacgacttgaattttgcagagaatgtggcggatcagatgctcaaggttcgaccgttaagcgaggattaggcaatgaaaaaatggattttaggtatcgtcttggccttaacattatgtttaactggttgccaaagcgtacaaaaagaagctaatactcaagatacatggaataagattgccagcaaaaagcaagtggtaattggcttagacgatagttttgtaccaatgggctttgaaaagaaaaacggccaattgacgggttatgacatcgacttagctaaggcagtctttaaacaatatggcattaaggtttcttttcaaacgattgattggtcaatgaacgttacagagctgcgtaacggtacgatagacttactctggaatggttacagcattacgccagaacgacagaaaaaagtagcttttagcaagccatatttacgtaatcgccaggttttagttgtgaaaaaagatagtgacattagttcatttaaacaaatgaagaattatgaattaggaatgcaaactggttcaacagcagagcagtggtatgaaactaaacaagatgtgctgcatgctaagaaaacagttttatatgatacgatttctaattcgttcttggatctgaatgcaggacgaattcaaggaattctgttagatgaagtttatgccgactattatattgctcacatggctaaaagtagcgaatacaaggtaattcagaatgatcgcgtgccaatggacttgttcgctgtggggatgcgtaagggagacaaaactttgcgtcagaaggtcaatcaaggtttagcaaaattgcaaaaaaatggtcaattgcgtaaacttaatgaaaaatggtttggcagaaacaatagttggttaggcaagtaatatgaagatagataattttacttttaaaaagattgatgaaatgacagctagagaattctattgcgtagaaagattgcgcaacacgacttttgtggctgaacagaagataactctaccagatttagatgatgaggacctaattgctgttcaggtttatttactcaatcaaaaacagacgactgccttagcgacttgtcgtctgtttcaagaagatggtaaatggatgctaggacgcgttgctgtgtcaaaagaagcgcgcggacaacagctaggatcgaaaatgattacagctgtgcataaatttttacggcaaaataagattgatgcagtttactgtcacgcccaaatgcgggtaaagcctttctatgatagcttgggctatcaagttgtaggcgaaccgtttgatgaaggcggcgtagaacatgtgatgatgaagagggacttggcttaggctaagtcttttttgattactggcacgatttgattaactaaaaactcatttccttgatcagttaaatgttgcccgtcggcttgataatatgtcgatttgtcttttaagtttctcattgcaggtaaaatatccacaaattgtgcaccatgtgcctttgcgactttttgggcgatattgttaaaaagatcgagtctttcagcaccataatattgaaaaatgtcactttctggattgggattgcacaatcccacaacaatggctttgcctactgcactaaggatttgagccaagttcttttcgtagctttctggactaatgccccaagctgttgcggcatcgttattgccgtattcaacaacaactagatcatgttctggggaaatttgctccaaataatcgacgccttcaactgtggtagcaccgcttttagaaatgttttccacctgtgcataattaattagtgcctgttgaaataaattagttactaggtttgtattttgaccattacgatatccgttaaaaatggaatcgccgaataggattatttttttcatatttttagcgctttctattataataagttagtgttttagaaggaatatggatacgatatatgagaaattatacgagttttaacagaaatgaatgggctaaattagctcccttagataaagtcaatattaccaaagaagaattagctgatatcaagtctttaggagacgtgattgacctaaccgacgtgcatgagatctataccagtttgatcagttacttacacttagtttaccaacaaaaaaagaatgcgcaaaaagcacaaatcaaatttttgcataaaagtttttcaccagctccgtttatcatcggtatttcgggttcggttgcggttggcaaatcaaccactgcgcgtttattacaattgttgctcagtagaacctatccagaattaaaggtacacttgatgaccacggatggttttatttaccctaatgaggaattaaagcggcgtaatttaatgcctcgcaaaggctttcctgaaagttacaatatgactttgctcagtgattttttacgagacgttttaagtggaaagaaggatatcgtttatccactatattctcaagaattaagcgatatagtacctgggaaatatggtcatgtaaaaaatcctgatgtattgattattgaaggaattaatacattgcaattgcccgagagtggacaagttgtgactagtgactttttcgatttttcaatttatattgacgctgaagaagatttgattgaaaaatggtacatgcaacgctttagaaaagtacttaaattaaataaaaataagccagataatttttactataaaatggctaatggaccgctggaagatgcaattcaattggctgaagaaacctggcagatggttaatctggtcaacttgcgtgaatatattgcgccaaccaaggaacgtgctagcctgattttgcataagactgacggacatttgattgatcggatatacctgcggcacatctaatttggtatactaggtattatgaatacgatttatttactgttgataaaaaaatttgctttgcctccagcgtgtttaaactagtcgaaaggtaagtttaaattaaagggagaagaaataatggtacaagcaattaatttgaaaaaaggtatgatttttagccaagatggcaaattgatcaaagttttaaaggctaaccaccataagccaggtaagggtaataccgttatgcaaatggatttgcgtgacgttaagagtggtgcagttgtccacaagaccatgcgtccaactgaaaaagtggatttagttgaagtaactaagaaaaaggctcaatacctttacggcgaaggtaatacttatactttcatggatactgatacttatgatcaatatgaagtttcagctgatcaattgggtgatgacgttaagttcttgatgcctaacattatggttgatatggactttacagatgataacaagattatcggtattgaattgccatcaactgttgaaatgaccgttaaggaaacacaaccagagattaagggtgcaactgtagctggtggtggtaaacctgctactatggaaactggcttagttgtgcaagttcctgattttatcaagaatggcgaaaagctaattattggtactgaaaacggtgattacaagtcacgtgcagatagtcaacctagataaaagataagaaaataatcctcaacttgtgcataagttggggattattttagattacagcctttgttctagcattaatttttacggtatgtttgtgtttaccgtggatcattttaacttcccaaattgattgattattgtcatcagttaattcccatgaaatcggtgttcctccactgaattcttttagggcaatttcattagcttcttggcgtgaaattgtcttttttaggttcaaagacgcatctttttcgtagtcataatcaagcacctgcgtagactgacctagaatcttgttattagttgcgtcaacttgaatagtacagtctttacggtcatcatagcctactatgtcataaacatagatatctttactacgcgtggtgctagttaaatcgttctagacaataagccaaattataagctaaaattgcaatttccaaccggctttgaaagcctatcagactacgtgctcgattgttctcggcattgtaataggtcagaagcgaaaagtcgctttcaattgttctgcgaatagccatcaattgatgatcattgtgctttttagctcctgtcatatttttacgatatggtgtccaaagttcataacccatttgttttagctgttgatgcagttctttgcctaaatagccttcgtcgccaagaagatagtaattagatggatgggtattttccagcagttcaactgtctccctggcatcatgaactgatgcttttgttacgacataatcaagaatgtaaccgtcatcgctaacaatgacatgaactttgaaaccatagaagtaaattttcttggtggccttataaccaatgttggcataaccgcgaaaaattttagcacgatagttgcgaattggttggcaaacaggtaccggaaagctgtcaatgatcaagaaatgtccattcaggtcaacctttttattcatttcttgccgtatctgataaatcaattgcaatagctgacgtgaacgtcgattaaaacgtgagtgtgataaacaattgaaacattcacagaatcttctttgtgattcaattcctgtcttagcttgccagataagtaaagccaaaatcagactgtccgtagttttaatttgatcaatatttcgccgatgagtaaactcagccggtgcatacaaacgataccagtgccgacaaattatcactaaatctttaaaactaacttgtaaatggtggctaaaacgcttaagcttaaggcagttcaatcagatcaggctcttttctattattatacaagttgagtctaacaagattggacttttttattaactaaaacgatttaactagcaccacgcgtatctttacttaaactaagtgtgatcgatttaatgaaaaacgcccgaaaatccccgtattttaatgtggggatggataggaccaagctgacctagcagtcagcttttttattaaaaaatagagacatatgttcgacttccctgtaaaatataaatatctaatctatgagtcatgtggtaataagtcaaatgaaaggcgatgatatttgttctttttgatcataaatttgagtatatgaaactaagccttggtaaaggttgatttttttaatgttaaacttttgtttacttttaaatttagaccaatttttgaaattaagacctcggtgtcctgtacagtttgtcatctttgagcaatttaaagataactcgtactaattttcttgcagttaatgtgcaagcacgtttatgcggcgagtagacagcttcatcatacttcttttggtaatattttttgaaaacaggatcatgtaatcttgctagattggcagcttcaatcaagtaatatcttagatatctgtttccagtcctggccattggagtatgttcgttgctgtgatctcccgattgatattgattccaggttaggccggcatacttagccagctgttcttctttatcaaagcgatcgatacttccgatctcagcgataataccagctgtataggttttgccaataccgggaattgattccagaattttgctttctggtaatgcatcaacgatacgatcaattgctttttctagatctttaatagattcattaaagctttgaatcatgttgtaatgaacagaaagcactgcatcaattgaatcagtcattactttgcctaagcgatatgaacctctaacagctttcttaattgctttagccaaggtatctggatcggaaaagcgtcctctgcctttaacctgtaagtaagaaattaagtcttcggtaggcatatccgcgatctcatccagagttttactatcggttacaatagacatcattgtagcaccgaaaagaggagtattaatcttatctttatcgacagtgattagtttattaacccgataatataaagcttcaatgaagtgctgtttggtacgagtcagttcttgaactaattcatatctggtacgcgttaaacgctctaaagcaagatagttgtcttgtctggcaatgcttactcgataatgtccaaagcttagatacaaagcaatgtaataagcatcgagaggatcagttttactttcttcaaagactttatgaaacctgctggtttcttgggggttaattacatcagtctctacattgagcttttgtaaatcttcgtcattttggaaaaagtaagcaggatgaaaactgtaaatagatgtagcttccatgccaataatgatttgatcatagtgtttattttgagctagatctaaaatttgttttttcagttcactagcaccataaagatcattgacaaagctatcgttaattaagcgtttgttttgatcttctgaatcaagtgcaacgacctgtaaatctttagaactaacatcaataccgacaaataatttcattggaaatggcctcctttctttcaaatttctgatcatagattttgatcttcacatgttaacccctaattacagttcttaagttcaatctcgccagtataagtattcactggttgcttctttgaaagctgcacctaatcccaattgctcaaggactagcaaaaagaagcaatcaatacagcatgtgagttagagcataaaggaactgtctgggtggcagacttataaagcagacaaaactgcaggaggtgataacctagaccagttgaccaaagccaatgacaattagaggctaacatgtgaagatcaaaaagcaaatactaatttgattaattatcacaatatgactaattacaatttatataatacgaggaggtgaaacacatgaaaaaaatgagcagtttagcctatcattttggcgttaagcttcgcttttatcctagttctaagcaaaagaaaatcattaagctaaactatgatgcgcagcgctttgtctacaactcttatgtaggacgtaatcgaagtaattatcatgctaagggctacttagctgttagacaatatcaagcaatgccttttgccttttctattcttaataattatgagactaggttggcagaagaagtagtcactaatagcgaactattggctaagccaaagaatatccgcgatacttatagctttttgcgtgttaaagaaattgatagcctcgctcttgccaatgccattcaaaattatcagaaggcttggaacaactatcgtaagattggtcatggaatcccaactttccataaaaaacgcagcgactggtcatatcagaccaactgtcaatatcctaagcagccagaagcttttcttgataacgggacagctaggtttattgatgctaagcatattaaattgcctaagctaggcgttgtccgcattgctggttttagaaaactgattaaagagcgcttgcttaatcatatctcaactagaattgggacagtgacgataaaaaagaccgctgacgagcaattctacttatcaatgcagttaggcagcgatattgcctttgttaaagccttgcctaagacgcagagtcaacttggaatagatctcaaccttgataatttcttaacggattcaaatggatcaatggtcgctaatccacgcttttaccgcaaagccaaaaagaagctggctcgtgctcaacgagtattatctcgcaggcagcgccgggctaaaaaagaaggacgcaatttgcggctagcaaaaaactatcaaaagcagcgcttatcagttgccagactgcacgacaagattcgcagacagcgtgaagacttcttacaagttctctcaactgcattaatcaaaaaccacgatttagtagttgccgaggaattaaggagcaaaaacctgcttaagaatcatgccttgtctcaagctatttctgatgttggttggcgtagtttcctgaacatgctggcttataaggcatatctatatggcaaagaatttctaacaattgatcctaagtacaccacccaaagatgccatcaatgtggcagtattatgggccaaaacggttataagaaattaacccttaaggatcgggaatggacttgcccaatctgtcagatgcatcatattcgtgattggaatgcggccgtgaacatcttagaaaaaggattaggcaagtggcagaatcctaaaataaaagaagcagcctagaaaagctgcagtccgctagcaactcgcggacttaaaaggctttggtaattagacgacctctatcggcaatagtcaaaagattactgctggtaagtcaaatccgtatctaagcaagttggtgttctggttagcgcaagctaacaagccactaaaccctagacttcagtctaaggtagttgacctactgcatgtgtatataatgatttgaatttctgaacggcggaatcctgtgagagattaatctgtggcaggttattgctagaatagctgatcattttcggttgagctgttaaattagtagttcgaatggtaaagttacttacctttgacgattgactatttagatagatcgttgccccaattatcccaataagtaacccagtaataatgctgctgataatgataaaaaattttctcatgaattccacctcgttattatgttctatatgtttactgatattatatattacataatcacaaggtgacagcttatcactaggagctttgaattttcttatgttttttgctacaaaaatgcaatatttttaaatgaaaagaaaaattaatgctaaaagtgcgggtagcatttgtactaaaaagattttcttagttgcagtgaatccgccgtaaattgctactacgacaattaaacttagaattaatttccatacgttaaaaagaatagggatagggaaaataaagaaagcaatgatcaaaattacacctaacataccattgtagatgccttggttagctagtgaaacttgagcagcttcttgtttaacaaaattgatatccatgtcaaaagccttagcttgttgttcaggtttaccaaacatttctaagaaacagataccgatatgctcaatagccacgataaatgttaggattgttctaataagtgtgaaaagagtgtaaggaccatattttataatttccataaaaatttctccaaatatttttctataattatacaatagatttttgttgacaatcgtgatcgaataaattatgattattcttatcaaaagtaagaaggatgatgaatcacatgtttaagcgtcaaatgcaatgtcaatacactgaatgttgttgtacaaacagcatttatttgacatgctctgatgtggtgattcatcttaagactattactgattaactagttaaaaagttgtggttcttaatgggatgtattccgtgttggagtacatcccatttttttgtttgagaaaggaaaatttatgtcgaaactaaagggagttttagcaggagtcgttactatttcattaggaatgcttcttgcagcatgtggtaatggcaatagcagtagtaagtcggcagctcaaagtggcactttaaatttaagcaccacagctccactagatactattgatatcagtaagtctaccggatttggtcaaactggcaatgtattcgaaagtttttatcgtcttggtaaaaatggtaagccaacagccggcttagctaaaactgggaccgtatctaaagatggtaagacctggacgtttaagatacgtgattctaagtggtccaatggtgatccgattgtagcgcaggactttgtttattcttggaaaagaagcttgaatcctaagaccgcttctccgtatgcctatctttttagtggcgtgaagaatgctgacgcaatcattgcaggaaagaaatcacctaatgcattaggaatttctgcaccggataaaaagacggtagtggttaagttaaatcgcccgatcgcttactttagagtattgatggcttatccactatttgggccgcaaaacgaaaaagttgtgaaaaagtatggcaatagatacgcaaccaaggctcagtaccaagtctactcaggtcctttcaagattaaaggatggaatggaactaatgatacctggtcatttgttaagaataatgattactgggacaagaaggtagtcaagttgaacaagattcactatcaagtagttaagtctaacaatactggttatcagttgtatcaacagggcaaattggatttaactccactttcaagtgagcaagttaaaaacttgaagagcaataatgactttactcaatatccatattcgttagtgcgtttcttgctttataattttaaggataaaaatgcagttaatagaaaggccttgaataataaaaatattcgcttggctttatcattatcaattgatcgtgatattgtgactaaaaaggttttaggcaatggctcaactctgccaaaaggctttgttgccaatgatttggctgcaaatcctaaaacaggtatagattttgctaaagaacaagcagtgaaaaatacagttgattataatccagctctagccaagaaatattggcaaaagggattacaggagattggccaaaagagtttgacttttgatgttttatcttcaaatgatgaagcagacagtgatcaattgacccaatatttgcagtcacaatggaccaaagaattgaagggaatcaagataaatattaccaatattcctgataagtcaaccaccagtcgagcacatcaaggcaactttgacatttatctctctcattggggtggcgacttcaacgacccgatgacatttatgcaaattccaatgacaggtacgtcttacaattacggtaagtggtcaaattctgagtacgataatttggttaaaaaagctggcaatcaagacgccaataatcctgacatacgctggaatgatctgatttcggcagctaagattgtaaatagtaatcaggctattacaccgatttatcaacagaccacagcttacttgcaaaacaagcgagttcacggcatcattcataatactgctggtacgcaatggtcatataaatatgcttatgtagactaattaaaagggagcgatcccttttaattttgcagtaatttaagtaaagtattaaaaaatattgaacaaatacataaatatagtattattaatttaattatttttaatataaggagaatcaatggaattactgcaatattttaaaagattaaagtgggaatttttatttgttacatttttaatagtcattaatgcaggctttttgacactagccggaatatctagcgctaatgctttaagtgcagttgcaaaattaaaagctgagcgttttttcatgtgggttgccttaatgggcggtgcctatattttttacgcgattgttaactgtctagtcaatgttgagcaaacccgtttggcacaaaatgtggataaattaattagaaatgacattgcgcaagatctatcacagacgagttattcaggctttcatcaacaaacggtagctacttacaattcttggctgaccaatgacattacaaccattaataactttggtgtcgaggatttcatgatgatcattagacaaatcagtgaaattgttttcggtatgctcactttggcgtacttcaatgtcagtcttgtggtcactgtgattattttgacaattattatgggagtggttcccaatttgttttctaaaattttggccaaaaggtcattagaatatacccatgccaatgaacgtttggttaattcaattaatgatgtgttgaatggcttcaataccttatttcttgccaatttaccgcaaacaatcgtcaaaaagatcaatggcgcttctgatgatgttaaaaaacatgcgctaaattatagtaaaacagccgggataactcaggcgattaccaatggtctagcctttatcagtcaagttatcattttagggcaaacaggctggttgattttgcatcaattaacgccagtcgggaccatcagtggggcacaattttttgccagtacaattttcgctgaattaagtgggattagttttaattggcaagaattcaaatcagttaaaccaattatagaaaaatttaagactataccgcttaaaactgttgatggagctttgcctgctgattttaaactaagcaatctagaattggataaagtttcttatcagtattctggacaagataagcctatctttgagaatttgaatttaaattttaaactgaaaaataaatatattctgatgggggactctgctgaatttgatttctggcttacttagagattatcaggggaaaattgaaatttctgatgtggaatataaccagatttcagataaggatttgcatgatcagattacatatttgcagcaagatccatatatttttactgcttctctagggtggaatttaactttgggacgccaagtttcaaaagcaaaaatttctgaagtgatcaaagaatgtggattagaggatctaattgctaagttgcctgatggcatggatactgttttagctgaccaaggtaaacagttgtccggtgggcaaaaacagcgtgttgcttttgcacgtgcattgctgcgtgatacaccaatttatctgttagatgaagctacttctgccttagacaaagcttctagcgtacaattagaaagattgattttgacgcaaaaagataaaaccgtaattatggtaactcaccacttaagagatgaagttaagcagttagctgatcaggtagtcgatctaaatgaactaaagaaaaattgatgaattaactaaagggagcgatcccttttttagtttttatattttattgttgcaattacaacaaaattaaatataatagtttttaggtgaaaaacatgaaagaagatattttgcgtcaaattggcactattgcgcgagcacttgattcgattgctaatattgaatttaaagagatgcaattgaatcgaggtcagtacctgtatttagcccgcattaaagaaaatccgggaattatttctgaccatctagcagggatgcttaatgttgatcggacgacggcagctcgtagcattaaaaaactggaacaaaatcagctgattaggaaagaaaatgaccagcagaataaaaagattaagcatttgtttgtgacagaattaggagataaattagctgctcgaatagaaaaagaaaatgcttattcaaatgaaatagttttgacaggactagatcaaaaacagagaacagaattagctgctttgttacaaattgtagaaaagaatgccagtgaaaattggcacctggttaagaacggtggaaagaggaaatattgatgaagtacgagattaaagcaattacaacagcggatgtgaaagaattacagaaagtttcacgtgaaacttttaaaacgacttttgatccttatactgcaccagatgacatgaaacgctttttagaggaagattatcagacggaaaagttgattagagagattgaaaatcctaatagtcgtttttactttttaatggttaaaggaaaaattgctggttatttaaaaatcaatgttggggatgctcagactgagcagttacgtgataatgctctagaagtggaacgaatttatctgcgtactaattttcaacatcgcgggttgggcaatgttttgtttgattttgcagaaaagacagcacgagaagaaggcaaagattacatgtggttaggcgtttatgaaaagaacattccggcacaatatttttataagcgtcatggatttgaaaaagtgagccagcatactttccaagttggtagcgatcctcaaactgattggttattggtaaaaaagttatccaaaaattagacaaaataaaaagccgcaacttcgagaataatgttgcggctttctttatgttcttaatcttattaatcatcatgttcagttgaaataacttctttggtgtgagcgttaattttaacttcggtttcttgatgaccatttttaaccttaacttcccagtatgttttaccagtgtcttcgtcttgctctagtttccattcttcgctagtgcctttaatgtgctcttctgcgatacgactagcatcgtcgcggctaatggtgcccttgaaatctagagctttttggtttcgatcatcatgatctaacttttctgaatgaacatgtccaatttgaccagtttctgcgttgatgttaacagaatattcattgtttgaatcgaatccttcaatttcataaaggtaatgtttgccttcacgatttaattcaatgcttttaagctgtttgccactaaattgttgatggaatttatcaatggcttcttgctggcttaatttgatttgaatattatctttttgagtttgtttgctcattgctgattcagaattatgtgtaacctttgatgaagtaacactcttttgggtagtagttttagcagttgaattatcttgttttgaacatgctacagttcctgttaataaagctgcgcttaataatgcaatacttgtcagtttagtaaatttcatctattctataccttcttttctcaattagtcccgttcaacactgattacttttttagtaattgcgttaatttttacttcgctcttttggccgttcttgctgatggtaacttcccaaacattctttgaaccttcacgatctaatgaccattcaactgccttgccagatactcttttttgagcaattttagtagcagttgagcgagaaatagttttgctgagatttaatgcttttttattacgctcgtctcgatcaagtctttcggagtgggatgagataactttgccagttgcggcattaattttcatttcgtattctctcgttgaattgaagccttcgatctcgtaaacgtaacggcctttttctttatctaagctgattgattcgactttagctgccttgaattttgccttaaactttttaacagctgaattttgtgaaaccttaattttgcttgaagcagcttgaaccacgttaggttcagtagctaaattagttgcggtaattgcagcagttcctaagccgagtaatgctacgccagtaatagtaattttctttaagttaatagtcttcataatatgttctcctttaaactattgataattttttgttttgctttaacttgatatatttatcttactagctaagcagctttaaaaaactaagatttaatagagtttaaatgaagatttcttcatttttctgtaggaaaagaaactgtaaaaattgttccctgaggactattatccgtaactttaatttgaccatgatacttatcagcttcagctttgacaattgctaaccctaggccagatcctttaactttattggagtgggacgtgtcttcacggaaaaaacgttgaaagatcttctcgcgattttctggcgcaatgcccattccgttgtctgcaactgtgaaagagacctgtcctttatttttagctaatttaactacaatagtgctgtcttgaggagaatattttgccgcattttccactaagttgtgcacaatgttgtgaaaatctagtgaattaatacgatatttcaatacttgtggcatgtcagtctgtattttttgtggataaactgactgtatttctgacactacttcattaataattcttaccaaatcaattttgacgacttcagtattgcgttcgattcttcctaaggtgagtaaatcgttgactaatatttccatcttttttgattcagtatcgatataatccagtgacttagggatgatttctggtttggcttgaccatggcgtctgattaaattaacgtgtcctcgaattgcggcgattggtgttttgagttcatgtgaagcatcactgacgaattgttgctcacgctgtaaggcctgtttttgaaaagctagcagattgttaaaagactgggctaattttcgaatctctaatggttgttgcggcactgtgatttgctcagttgaagcaccttgctggatttcttgaatttcattattcattacctgaattggacgactccatttgtgggcaaaacggcgaataagggggatgctcagcagaatagcgattaagttgatgacaatcattgtcccaaatagccaaataattaaatgaaataagcgatcaatgtttaatgcaaccttgattttaaagtcatgcgagttttccgtccgtaagaagtaaatatgcttattggaatagaccatgttttgataatgattttggcgattaatttgtttaaaggtctcgtgagcattttcagagtaataacttttgccttgaggggtggttaaaatgatggcatcatcgtcttgttttgccaaataagcatccagcatagccgaccagtcatattttgaatcaagattttcttttactgcttcaacaacttgttcactttgccgttcagcttggtaataaatataggccgatgaaataattagaaaagccaaattgaccagaattaaaatagcgacaaatagcctaacgaataaacgggttaattgttgcgtagttgtttgaggatcagcttttttcatgattatcatctaattttctcaaacaatagcccaagccgcgcatggttttaatgatctttttgtagggattgcctatcttgttgcgaatagttcgaatataaacatcaacagtattggtttgaccaacaaagtcatatccccagactgtatcaagcaactcgtcacgacttttgactttttcggggtcccgcattagttcagtgattaaggcaaattccttaggagtaagataaatttgctcggtgtcacagtaaaattcgtgcttaagcagatcaatttttaatgggccaaattctagggaagtatcagggacgtcattttgctgccgcattttttccagtcttcgcaagactacccgaattcgtgccagcaattcctcgatttcaaatggtttggtgaggtagtcgtctagtccctgatcaagagcagagcttatatcagaggcagaatttttggcggtaagcataataatagggacatcactttgcttgcggattcgccgtaacacggtcatgccatcatatactggcaacatccaatcaagcaaaattaaagttggcttttcttgagtaaaaaggtctaatgcttttttgccgtcttcagcccaaacaacttggtaatcctcaaattctaattcagttttgacgaagctagcgacgctttcttcatcctcaactagcagaattttgacatctttttcatccatatcattttccttaaaaataaaaggccggaaatcgattccagcctgaatatctgttaattaattttcgcccttaaatgtaccattttctacttcacgaataaagtcagctaagtgcttataatatacgtcagggttgtcaaccatgtggtggtgaccaccgtcaggtgtagttactaagcgtgagttagggatcttcttttgcataatcttagcagttgaaattggcatagtttcgttttcaccaaaggttaatagggttggcaccttgatcttgtgtaattgatctctgaaatgccagtcttttaatttaccagtaattacgaattcattgtcgccttggaaagcattgtaaacagcggttccaccaatgtcttttaagtggtaaagcttagatggttgctttcggtcaacgaaattaatgtttaaaatttgtacgtcatcttgatagcgttgattatcatagtcgttgttcttttcgcattcgtgcatgaagtcgatttcggtttgtggtaaaacctcttggcgtcttctgttaactgaagcaacgtactcatcgatttcatcaaccattgaggagataattgcacctttcaagtgttgaccatatttaacggcgtattcttgaactaataggccaccccagctttggccgattaaataaatgttatcaagtcctaacttttcacggacttcgtcaacctcatctaagaaatattcgtaggttaaatatttcttggcaatttcaggatcagagtagtcaggctgatctgaataaagtgaaccgagttgatcgtacatagtaacttgcacgttcaagccttgctttttcaattgttctgcagtgtcttcccaatattcgtgattgccgccaggaccaccatgcaaagctagaagatgaatgtcgccttcaccttgggtgttggtccataagtgataaccgttgtctaaagtaataattttagtaccagtcttcattaaaagttcctttctgcttttcattaaaaattaaaatgattactctaattatcgtatctaattgagaaaaagacaagctagcgggtataatgtttctaacgggatagaaaaggagaaattaatgagcctgaagtacgctaaaaaaagccaaattattagctataccattttggccgcaatcaaggcctgcaacatcgtctttgtagcttatatggtacaaattatgttgaatgttgcttcgtcaggatcgcatgattatctgcatttgattcgcctggctgctttgactgccttaggtcagatgtgttttatggccagtaactttgtctatgaaacggtaaagatgggcattattcgtgacgtgaatatgacctttaagcgcactaacttgcgttatttggttgatcaaggtgagcctgatatcaagagcggtttatcactgatgaccaacgatttaaaacagattgaaactaatcggataacggcacaattggatatgattttccaaggtttgtcgtttttcggggcaattacttttgctttttatagttcatggcagatgaccctagtatttttgattgctacgcttgcgccagcattagttcaaatgattactagtcctatcattacacgtaagtccaagatttgggcaacgactaacgctaactatacgcaaaatgtgtccgattcattaaatggggcacaggctaccaagctttataacgtgcgcaccaacatcgttacacgagcagctggtgcggcccaggcaatggagaacgctctgcgtaatatgacgttgactcaagcttgggcactagaattaatttattcagctgctgaattgttttgcttcatcgtaccatgtactattggcggtattatgatgctgcagggaaatttaaaggtgggtacattagtaatgatggtcgatttggccttgaactttatcacgccaatcgtgactctttttaacgaatttaaccaagtcaagtcgactgtgccaatgtgggaaaagacccagcgcgctttgcatcacgtgctgaaagatgataagcagaagatcgatcattttgatggtatggaggttgaacaattatcttatgttacaggtagtgatcacaaacgcatctttgagaatgtgaacttaacagttaagccgggtgaaaaagttctattgatggcgccaagtggttggggcaagaccaccttgcttcgcttgctattaggtttgagaaagcccaaagacggtaaaattttgatcaatggtacggatgtaacgggaaattgggatgctgcccataattatttttcctatgttaaccaaaagccattcatgtttgatgatacgttgcgtttcaacattacgttaggacgtaaagtgagtgacgagcatttgaaagaagttattcatgaggctggtctagatgaattggtaaaggaacagggtctagacaaggctgtaggtgaaaacggcagtggcttgtcgggtggacaaattcaaagagtagaaattgctcgcgcgcttttatcagatcggccgattttgctggctgatgaagcgacaagtgcgcttgacccgaacttgtcgttaggcattcataagacgctgttgaagaatccacgtattgctgttattgaggtggctcataagatttcaccagaagaaaaagcgatgtttgacgtgatcattcatttggacactcatacaattgagacaaagatgtaaagagttgctcgttgatcagctttttttatataaaataatacgcagggtgctagttaaatcgttttagttaataaaaaagtccaatcttgttagactcgacttgtaaatagtaataatagaaaagagtctgatctgattgaactgccttaagcttaagcgttttagccaccatttacaagttagttttaaagatttagtgataatttgtcggcactggtatcgtttgtatgcaccggctgagtttactcatcggcgaaatattgatcaaattaaaactacggacagtctgattttggctttacttatctggcaagctaagacaggaattgaatcacaaagaagattctgtgaatgtttcaattgtttatcacactcacgttttaatcgacgttcacgtcagctattgcaattgatttatcagatacggcaagaaatgaataaaaaggttgacctgaatggacagttcttgatcattgacagctttccggtacctgtttgccaaccaattcgcaactatcgtgctaaaatttttcgcggttatgccaacattggttataaggccaccaagaaaatttacttctatggtttcaaagttcatgtcattgttagcgatgacggttacattcttgattatgtcgtaacaaaagcatcagttcatgatgccagggagacagttgaactgctggaaaatacccatccatctaattactatcttcttggcgacgaaggctatttaggcaaagaactgcatcaacagctaaaacaaatgggttatgaactttggacaccatatcgtaaaaatatgacaggagctaaaaagcacaatgatcatcaattgatggctattcgcagaacaattgaaagcgacttttcgcttctgacctattacaatgccgagaacaatcgagcacgtagtctgataggctttcaaagccggttggaaattgcaattttagcttataatttggcttattgtctagaaagatttaactagcaccacgcgtaaaataatatataatccagctagtaaaaatattatataaaatatattaaaattgttgaattgaaaccacttacattatataattagattaacaaagttcatacgagggggtcttactatggctgaaccaaaatggcttaaagatatgaatgccgatgaatacttaaaagaagatttcgatgcaaagggtaagtctaagtatacagttgagggaatcgataaaaatgatcctgattggctagataaagcagctaaaaaagttcatgctgcggagggtgacgattatgtcaaacttgatgcaggtctgttaactgttaaccaacttaattggatgctgagaaataccattggtaaaatgacatttgttgatgataataaccaattcttgtggtataaccgtccaactgatcctaacaagaaaatgctagctacgccagatcaagtgggtgatacgatgcgcgcagttcacccagatgttcgtgacgttattccgaatgttaaaaaagttgttcatgctttgcggactaaggaagcaggtcatgatgatgtttatatgccaataccaacaggcaatttgaagaagttggttgtggactattataagcgtgtagaagacgaccaaggtaactatgctggtatttatgaatgggtcaaagacttatatccattagttaagtacttctgtgagactactggtcaaaaattggtagtagatgatgatgcaactactggtgcaacttaccgtagaaattctgatccagacgccgcaactggtgcttcaactaaggctgcagaagttaaagaagaaaagcacgaagaaccagatactacaactggtgcttcgcaacattaatatcaattgcaatgaaaaaagcgactcaatcgagtcgccttttttaattagataatctgattgtgatcattatttcatcaggcagattttcacaggtgatattctccttaggataagcaaagtaaggaaaaacttcgtagttttcgggaagatggatgttgataaatcttttgagctggtggtgagtgatagtttcatttgccgccaagttaattccagaataagtgccaaccatgctgccttcaggatcgtaatagttgataggcaattggtattttggagtgttagttgccttagtaggaagaatttgttggaatatttttagtctattttttaacatggtttaatcctcacttaattctagattattttaagaataaaaatggcttgaattgaatcatttttaattaatttctttttttgattactgtgcctaatactgcaaacaatgaagcaacgctagtagtgatgagtccaatcgtcattagcttgtcttggctttcaccggtttgaggtaaaactgtttctttttcagttatagttgaggttgggatagtcgcagcatgaggtgcaatattttcttcagtagttgaaggggatggatgattctttttaacttgtttttctacaacagattctggtagaggagcagtgtcctcttccttgaagtcagaggaattttcattatcagttggaggaattacttcttctggtaatgggggagtactctcttcttcaggatcaggagtaggctcaggctttagttccggttcaggctcaggagtaggttcaggatccttaggtggattctctggcttttcggggtctttaggtggatcttttggatcctccggcggagtttcaacttctactaatggcggagttaggtcccaacggtgagtttcacctttaatagtgattttgttaccaatgatattaccgtcaacatttttgttagcggtaatatgtgcgttagtagctaaaatactacctaaatggaagtctccttcaatagttaaatttttaacatctgttccaaaattccataataacttattaagttgagatggtttttcacttacgccattgatgctagtttggtctgaataatccaaaacaagtcttgtgctaacggttaaatcgccattttgaacattagttacatttaggatgatgattggtgtttctgcgtctgcagggatgcctttaatagcaatttcatgcttgttattgcctgaaaggtattttgcatcaatagttacataaataggatctttgctgccatccttgatagcattagaaacgtcgatccaactatttaccctccttgaaatcagcaattacgccttcggtttgcgtttgcttagcccattcgtctgatttatcgcttaatttatctagttcgccttgaatatctagaatttggtcagctctgatagttttgttgtatggaattcctactttttgccaatttccatttatttttacctgaatggaactaccattttcgtatgatttatattcaacatctggaccaaaaataactagtttattttcgccatcaatctgattcaaatgatcaatactgccgatgtaatgaatatcacaagtagtcaagttactagtggcatcttggatagtaccgaagttgccagcacttaatttgtctgttgcgacatttcctgcaatatgagcagatccatctatttcgttaccaaaaaggtggaaaattccggcaatgcctaatggatgttttgcggctacgtcctcaatatactttttaatttcttcgagtttacttttctctgtttcatcgccttgttctaccttttcagtgtcgacattaattgttggcttttttacagtgattgtttcgtctttatcaacattggcatcattatcaaacttattgatgtctttgacaggctcagatatctcagtagaattctctacagtagttttttcttgctgattatcattttctgtaatggactgatccggagaaactggctcagcagaatttggcactaccgttgtaccccccccatttttgctgatggaagcgaatttatcagatgcattggtggtggtttcaatattgaaagaagtattctcactattaattgtactttcagtgactgtttttgttgggtcatctgtagttgcagctggaacgataggtgcacttgctccgcccaatatgccgaagcaaagtaaaactgctgaggcgccttgtgctaattttcggatagcaaattgcgttttcttagttttaaacatgagtgtacctccataaaaatataaattaataatcacgtatatatcatatgacactgtgtcactaaaaggaacaaaatttttttgctgtttagaaaaaattaataaatgtttgcttgataaacggaaatagaaatatgttattaacgcaaaaattaaaaatgtcaattcttgtatttaattaatggtccactatactagatatcgatgtttttttacatagcacggataaggcacaagatcttgtattttgcaacctaaaataaaaaaggggaatgttgaataggatgtgaactgagacctaaaagttagacacttttaggtctttttctacgtaaagtcaagcataataagaagtttggcttcattttttgtttaaatttcaacttaaacatcttttagtgtcgatttatttttttagttagacacgacaaataagcccagatccatatctgatttttgggcttagcgttataatgtacttgatcaattaattacgactaaagtctttttgattatgtgtggctacgttgtaatcatatggttgatcattgataatcagggcataaatggttctgattagtttatgaattgaagcaatagctatctttttgaaccctttggtttgagaggatagctttttgctttcataataatctgctatatgacacggatttgtcttagctgcattatcaatttgtccaatagctcgataaagcaacttacgtgcgactgcattgccatgtttagtaatacttaaattagagtccatttctcctgactgatatctgcctggatcaattccgataaaagcattgattttattaggattactaaatctgcgtaaatctcctaactctgctaaaactctgacagcagtggtctgtgcaaagcctggaatgctttctaggttttctaaatcatgattaggcaaagacttcgctaacttaaccattcttgcgattaaattttctctttgatcacttaaattaagcaatctgtgtgcataatactgcacttgctcgacttctatgctagagcaagatacaactggataagcttgataagctaattcaattaatttatctgcagtccttagagcgtgtttaaaagcaatcccctttaagctcattaaccagttaataagctgttttttatcttctcttcttactaagtcacaatgaggatatcgcacaactatttgccagtaatttttacctttagcagaagaaaataaattttcaatttcaggaaaagtcgattgtagagcttggtgaagtcgatttttagctattaccaagtcacttgtcagctggtcatagaagcggctcaaagcattaagctgcttataagtttgggattcgctttgattaaccggatggcgataaagtctttgaattaaagctaaatgataagcatcagttttatcggtcttgttgtagcgtagccccatattcatctcttttttggctttaagcggattaataacaacatattcatagccgtagtcttcaagaaaagcctgcagtctgcgtgaataaacaccggtagcttcaaaaataatttgcggatgtttagaaaaagcggttaattcatgaagcaattgaataaaaccaggacgattattagtaatggttagttcatttttgctttcaccaattagttcacaaacagtagaagtagacttgcttacatcaattccaaaagtaacttgcataataaaaacctccaaaactgagactgtaaaatagtttgtgtaaggatgaatgattccttaaatttatttctttaaacattagaaaaaggagttcctttctcgtatgattggtttgaacaaaaaaaacatatacagaaagaagaactccttcatgaatgattttaccaaagattttgctcaagctctattcaatccagacaaaataaatgatttattgcgcaaagaactacaacaggctgttaataacttgctagaagctgaattgactgcctttctgggctatgatccctatgccagaaatggctggaatactggcaactctagaaatggtgcttattaccgcaaggttgatacgcaattcggacaaatagaaatcaaagttcctagagacagaaacgttgagtttcatcaacacactatgccagattataaaaggcatactgatgttttagagcaaactgttatcaagctctattccaagggcgtcacaacccgagaaatcgctgatttgattgagaaaatgtatggcggctattattctccagctatggtttccaatatttctaaagaaatgattcccaaagttgaggcatatcatcagcgacatctgtcagataagttcttctgcgtttatctcgatgccacctatattcctcttaagcgggtcacttatgagcgcgaagcagtttatatcgccatcggtatcaaacctaatggtcataaagaagtgattgactactgtattgcgcctactgaaaatattgagatttggagcgaaatgctcaaaggcttcaagagtcgcggccttgaacaggtagagctcttcttgtctgacggagtagttggcatgaaagaggctatctgccagtcctatcctaaagcgcattttcaacgctgcttggtacacgtcatgcgtaatatcagtgccaaaatgcgggttgacgatcgaaaaaaagcactggatgaattcaagcagattcatactcagtcaaacaaagaaatggctgtacaggtgctgcatgaattctatcaaaactgggaaaaagcctacaaaaacgtagttagagatcttagacaggttgagcctgatctgttaaccttttacaactatccgccagctattagagcttcaatttactcaactaacatgattgaatcctttaacaacaggcttaagcggaaaaccaagcctaaaacagaatttccaactgagcagtcgcttgacacctttattggagttcaggcaatggattacaatgaccgttactttaacaggattcataaaggatttgggcaagttcgagacaccctagaatcctattttgattaaaagataaataaaaaagtcaatcaacgagagagattatttacacaaacttcttgacagtctcggcgttagcaatgataatttttgctttgctatatttacataaccgttttgcaaccaagtatcgcgatttgggtattattgccttattatttttgcttttgtttgccggtacgcaatatgaaaaatatgtgcaacttaatacgcaaaaatcacaggcgattcaaatcgtgccattcatcaaatcgattgctaaagatgaaaatgtttcgacttctgatgttttagttagttcaacggttttaactaatggcatgatcgtaaggattgattctaaaaatattgattatcagttaaaccttaatgatgatcgcaatacttacacattaacgcaagcccatgtaattgatcataaagtagaggtaataaaataatgcagctagattacacacaattattcattaagtttgctctcggtatcttaactttaatcattcaaatcaatgtctttggtaagtctaatctggctcctacgactgcattagatcagttgcagaattatgttttaggtggaattattggtggcttgatttacaatcctagtattacaattcttcagtttttcctagttctaattgtttggacgttggttgtttttattttgaaattcagccgtgatcacaataattggattagagggattatcgatggtaaacctgttcaagtaattaaaaatggcaaggtgttagttggcaactgtatgaaagcaggaatctccgctaatgaattaatgtttaaattgcgcagtcgaggtatctactctgttgaaaagattaagaattgtatctttgagcaaaacgggcaattaactattattgaaaatgatgaagctaacattcgtttcccaataattagtgatggtcaggctaatattgatgtcttagagttgattcacaaaagcgaagcttggttacagcaacaagttgaagaggcaggttataatagtatcagtgatgttttcttaggagaatacattaatggacaattacgcttgacaggttattcaaagggaaagagataaaatggcagatttagtgacagcaaaaaaatggctgaaaaatgctaacacggtgatcgtaacggctggtaatggcatggccaaagaagagggactagatatcctaagtgaagaaggctttgatgatcaatttggcaaaattgcagataagtatgatgtgcatacaattggggatgcattagataagagatttgatacttggagcgagcaatgggctttttggagtgagctaatcaacgaatattccttacaatatgagcctagtgagacgatgcttgctctaaaaaagctaattcgtgataaaaaatattttattgcgaccagtacattcgggcacttttttgaaaatgcaggctttaatgaaaatcgaattttcaatgcctttggtgattggactaaaatgcagtgttctagcgggattaatcatggtcaaaaggataaccatgaagtagtagaacgctttatgacggcaattaagaacggcaacgtaacggcagatttagtaccaaagtgcgaggactgcaatagtccaatggaattgcatatgccgctgaatgctaacttcttccctgataccgatgctaatacgcgttttcgttggtttctaacgggagccgaggacaagaatgtcgtaattttggaattaggcgtagatgagaccagtcctcaattacttgatccaatggtaaagctagtgcagcaatttcctaattggcattatattgccgctgatttagctgatgcagatttgccagctgatcttaagaaacgagcaatgggttttgatagcaattcgcacgagatgctgatgaatttgattaaataattaaataggtgaagaatgagtatttacataaaaaatggaattttacatgtgaccggtgcgcaagacaagttgcgtaaaaaaggacaggaaaagcctgactttttgaccaattatacaatgcttgatattgaaacaacgggcttatatccttaccgcgatcgaattactgaattaggtggggttaaggtacgtaacggtcaaattgttgatcaatatactaatttggtgaagttttccaagaataattctgttcctgcttttattactaagctaaatggaattactgaagagcaaattgggaaggaaggtattccggctgagcaggctattcgtgaatttcgtgagtttattggtgatgacgttatcattgggtataacgtcaattttgacttgaactttttgtatgatttaagtcaaaaatatggcttaccagtgcttgataatgattacgttgacgtattgcgtttggcgcggacatattatccacgcgagcgccataaccgtctgcttgactgcatgcagcgggctggaattgctcaagttgaggctcaccacggtttgcaggattctcttgatacgatcaaggtttatgatgactttgcccagcactttactgatgatttattggaaaaggcacaaagcaagattaagaatatcgacctaactattggcgaattggattatgttgacttaggttggcacaatccggttcaaaataagaatatcgttttgtctggcaatattcatatgaacgaagctgaagcgggcaagatgatcaacaatatgggcggccaagttgacaattcagtgttagcaacgactaattacttaatcatgggtgatcaagatttctttagaaaagataatcaggatttgaatgcagcacgtgatttgatcaaaaatggtgctaagattaagcgtttttcggagacctttttcttaagcatgcttgatgattgggctcgtagttagaggaaaaagatgacacgaagaagacgaaaaaaacaaggaacggttgtttcatcattaattgtcttaatcgcgattttatggggagtttttactaaagctggcagcgatccaaatggtagccagtttttgcgtgactttactggcaataatgatgaacatgtaactaatacaattagcgatgcatcaaaagccaagaccaattatggaggtctatcgccaactgattatcaaaaattagctaatttgaattttaagagtggcagtcgcgcttataccgaagtcaaccatgataagtcgactttggtcaaaggcgcatggaagataaatcgggtgatttactctaaccttgattcattgaatcgaacatcgcgctctaatacagcctttttggaaaagcgcaatgtggctaatgatagcttgcgagtaaggcaatatgttgaaccgactggctggcactataatcaccgtaacggtacccaaatctataatcggggccacttgattgcctattcagtctcagctggaattgatcaaagcggcaattatgatccacgcaatcaatcaggggaccaaaataatcctaagaatttgtttacgcaatctgcttattctaaccaaaagattcagactatttttgaggctaaggttaggagagcactgcggcagaataagcgtgtaatttatcaagcaactgctgtttttcgtggtaatgagttaatggcccgcggcgtgaatttgcaggccgtttcaactgatggcagtttaaacttcaatgtctatctctataacgtgcagcccggttatgtttttaactataataacggtcgagcaaaagttgatcggcaaatgcaggttaatgagtagtagaattaataatatgaaaaattattactgaaataaaaaaggaagtacaaacaataatgaaaaaagataactgtactgcaatgctagttggtaaggacgcttcaatcgatggatcaaccatgattgcgcgtgacgaagacggttatggtggcattaacgaaaaagtttttgtggtaaacccagcccgtcattatgatgaagattatgtatcaaaatataacggctttaagatgcaccttgagggcgatggctgcaaatggactgctgtccctactgctgatgattcagaaggtcgctgggacgagcaaggcattaacgaatataacgttgctatgtcagccactgaaactgaagctactaatgctcgctgcttaggacatgatcctttagtagcaaatggaatcaacgaagactcaatggtttatattactttgccattcgtgaagactgctcgtgaaggtgttaagcgcttagggcaattaatcgaaaaatatggtaccggtgaaagcaacggtattgccttttcagacaacaaggaagtttggtatctggaaactggcgcgggtcaccaatgggttgcggctcgtgttcctgatgattcttacgcaatttgtcctaacatcatggtgattcaaaatgttgactttgatgatccagataactttatgtattcagctggtattcgagaattcgtagaaaagaatcatttaaacaatagtactgacggtagcttttctttcagagatatttttggtactaaggatgaagctgatgctttttacaatactccaagaacttggtatggacagaagttgtttaatccaagcattgaacaagacccaactagtcaagaaatgccatttacgcgcgttcccgaaaagaagattggtgttgaagatgtgcaaagatttttaactagtcactataacggtacaccatacgatccaatggacactttttcatctggttcagaaaaagaacaaaagatgttccgttctattgctttagacagaaaccaagaatcaagcatcttgcaaattagaaatgatgttcctgccaagatggctgcaattcaatggattaatatgggcttttatgcatattcaccatatgttcctttctacaccaatattgaggatacaccacttaactataaggtggcagatcatatggttaattcagatagtagtgcttactggttgtataaaactttacaagtgcttgttgaaccacgctatcaccaatatatttatgaggtaaacgcctatcgtgatgattgtcaaagctacggtattggccgaattgatcttattgatgaaaaagctaaaaatatggaaggcagagagcttattaaatatttaactagcgctaatgatgaaactgctggtgtgattaccaaaaagactaagaacttgatgagcaagttggttcgtcaagccttgaatagttcaaaatatcaatttgaacgtggagataacttatgatacaaaaagccatgactaattcatggcttttttggtacctaccacaatatttagtaaacccgaatttttaaaaagaaataagtgaaaaataaaagcaaatgcgaacaaaagccgaatacttgctgagaagcatttcacaaagtcgttgaaaccccgaatttcaaatgaaaattatttgttattttcgtatatttagcttagaattaatagaaaaatttaaaaatttaaatcaatatatagtggtgcgtgaaacttatgaatgatgagaaattcgtggaagtaaagaaccttaaaaaggtttatgataacggtcatgaagcaatcaaggatgttagcttttccgtaaaaaaaggtgaccttgtatgtttgcttggcccatctggttgtggtaaaacaaccatcttaaatatgctagctggtttgcttaatccaactagcggtgacatcctttttgatggcaagtcagttgttaacgtagcacctaaggatcgtcagatcggctatgttttccagaactatgccttatatccacatatgactgtacttcagaatgtaatgtttcctctgactgtgggcaagcaaaagatgcctaaggatgaggcgaggaagattgctgaaaaatatatggcaacgacccagattaccgaacttgctgatcaaaagccgggcaatttatctggtggtcaacagcagcgtgtagctattgctcgtgctttagtgcaacaacctaagattctgctgatggatgaaccattgagtaacttggatgcacgtttacggttgaagattcgtgaagaaattcgtgctttagttaaaagtgtgggtattaccaccttgtttgttactcacgatcaagaagaagccttgtcaatcggtgataagattattctctttaataatggcgtgatccaacaagatgacttaggacaaaacttctatcttgaaccaaataactactttgttgctaattttgttggtaatcctgtgattgataactttaatgtaaaggttaatggcggcaagattactggctcagattttgaaattaacgtggacgatttagacaaggatcgttttaaacgtgacttaactgacggcgagtacgttttatccgttcgtccagaaaatattttgccagtcgaagaagatggtgcagtttcagctaaggttgatgatgtcgaattaatcggtcgtgaacgaattttgaagtttacccatgatggggtacaagctcgttcattagtcaaccttgagacaccaattaagcctggtgataatatcaatttgaagatgcgtcttgatcgagtattcctgtttactaaggaaggagagcgtgtctactaatgaagagcaatcagaaaaaggcgtggctctttttagcgccaacaattatctttgttactttctttagtatttatccaattttgcgggcctttgtaatgagttttcaaagcggctcgttaattaatctaaattggagtggcttcagcaattatcaatatatctttagtgatccagaattttggcgggcaatcaagaatactattttgtatgccctaatttctgtgccagttgctttggctatttcaatcatgttggcctggtttattttcagcaggataaagcataagtcattctttgaaacgactttctttatgccatatgttacgtcaactatcgctattggtatcgtattccgttatatttttaacggtgactatggtttgcttaacttcttgctcaaggcggttcacttaccaacaccgaactggattgatgatccagcgatgtcattgacgacaattatcatctttggtgtttggacttctttagcttttaacatcgttatcttgatgggggctttgagaaacattgaccctaattactacacaattgcggatatgtatggcgcaactggtactgaaaagttctggcgtattacaatgccgcagcttgtgccaacgatcgccttcttattaacaatgaatatcattgctgcatttaagatttatacatctgtttatgccttattcaatggacaagcaggtgttggtaactcagccacaactgcagtgttctacatctataacaagttccaaattgttggtactccaggtgtagcgatggccgcaacggttgtcttatttatcatcattatgtttgtcacattcttgcaacgcaagatgatgaagaagattggaggacagtaaaggatgaagaagattcgttggggcactttgattgcttatattattttagcgattttcgcaatcattactgtctttccatttatctacatgattttgggtggattaatgagttttagagaaacaaccactattccaccaacaatcattcctaagcattttgaatggtcaaattatgccaaagtattcgcccaagctccatttgctcgttacttcctaaacacttttatcacagctagtgtaacgacaattgtgagtttgtttaacgccttgcttggtgcttttgccatggttaacttgaagttcaagggtaaaggtgttgttcaaatggtacttttatcattattgatggtgcctggtgaagcaattatctttactaactacaataccattgccagaatgggcttgttgaacacttatattggtttggtattgccatttttaacttcaattttctacatgtactacttgcaaagctacttcggttcaatctcacagacaatttataaagctgcgatgattgacggagcgagtgattgggaatatatttggaaaattttggtgccaatgtctaaaggtggcttgttcaccgttgctttattaagtttcatttctggttggaattcattcctctggccattattggtaactaacgaagacagcatgagattgttgaacaatggtttaacttcatttgcatctgatgcaggtagtgaaactcaacttcaacttgctgctgccacattgactgttttgccaatcttgattttgtacttcatctttagaaagcaaattattcgaggagtagtgcgcaatgaccttaaaggataaaacgacagtaactttttataatggtttaaccacaattggtggaccgatgattgaagtggcctataacaaatcgcatgtattgtttgacttgggggaagtttatcggccagagttaaaattgccagatgaaagttatcaaactctgattaaaaataaattaatcggggatgtgcctaatttttacgatcctaaattaacgggtaagccaattgatactgaccgctgggagcatgcggcggcctatatttcgcatctacatttggatcacagtaaggcaatgaactttttggccccagaaattccactttatgcaggtccaattacagctcatttattgccagccttgaatgaaaagggcgacttcttgcttcctgctgcaggtcatgatcggacttatactcgtccaatcatcgcggcagaatacaagaaaccaattaaggtgggcgatattatcctggaaatatatcctagtgatcatgacgcttacggtgctactggtctattagttaagacaccggataagcaaatcgcctatactggcgacattcgcttgcatggctatcatccagattgggtgcgggactttatgcaggcagctaaaaatagcgatatgctaatcattgaaggtactggtgtttcttggccagaagaaaagcatgatgaaaacagtgaagagtttactggccctaagaatgaagtagaactaactgaagaaatcgtgcgcctgcaaaaggctaatcctgaacgccaaatcacttttaatacttatcctactaatgttgaacgattattgcgaatcattgccgattcaccaagaaaggtcgttttacatgctcagcgtgcccatttgattaatgaaagtttggatgaagactatccttactattacatgcctaatgaggagcactatgctgaccttaagccagagctagaagttagctatgatgagcttttagcagataatcataaatacatgtggcaagttgtcaccgattatgataagctgcaaaagggtggtttgtatatccactcaaatgctgagccattaggggattttgatcctgcctacaaaccatttgtagaggctttagctaacaatgatattgagtataaggcgttgcgctgttcaggccatgccgatgaaaaagaactcaaggaaatcattgctggggttcaaccagctgttttagtaccggtgcacacattgcatccagagctggaagagaacccatatggagaacggattttacctaaacgtggtcaaacaatcacgctttagtaaatcaaaaacatattgttgtttagttttattttttgggaggatttatccaaatgaagtttagtaagaaacttactatggctgccgttgctactttggccctagttggcactgctgcttgttcaaagagcggcaattcttcttcatcaagttcagagaagattccatcaaagattactaagaagactacagttgtcttctggaacgctatgccgggagtacaaggttctactttaaagcaattaactaatgaatttgaaaagaagaaccctaaaattactgttaagcttgaaaaccaaggtgcatacaatgatttgcaagctaagatcaactcaactttgcaatcaccaaataacttacctactattactcaagcttatccaggttggctttggaacgcagctcaaaacaagatgcttgtaaacatgaccccatatatcaacaacaagaatgttggttggggcagtgcaaaggcatctgacattagaactgaacttcttgatggtgcaaaaattaagggaactcaatacggtatcccatttaacaagtcaattgaaactttgacttacaacaagaccatgtttaagaaatatggcatcaagaaagttccaactactatggaagaacttaaggatgtttcagaaactatctacaagaagagtaaccacaaagttgtaggtgctggttttgattcactatccaactactacactcttggtatgaaggacgaaggcgtgaactttactgataagattaacttcagtggttcaacttcaaagaaagttctcaacttctatgcagatggtattaagaagggttacttcagagtagctggttcagaacactacctttcaggtccatttgctaacgaaaaggttgcaatgtttgttggtacttctgcaggtgaaggctttgttaagcaaggtgtaggtaacaagtttacttatgatgttgctccacgtcctggcaaatacaccatgcaacaaggtactgatatttacatgtttaaccacgctagcgctgaacaaaaagctgctgcatttaagtacattaagttcttagtatctaagtcaagccaaattaagtgggctaatgctactggttacattcctgtaaacaatagtgcaatcgaatctagtgaatacaagaataacaagagcattaagcttcctgctaaacttcaagatgctatgaagaacttgtacagtgttcctgttgctaagaattcaaatgctgcatacaaccaattgaacagcattttgcaaaatatctttgctgcagcccaaaagggtcaaaatactaacagccaaattaatactggtaagcaaaaatttgatgctgcttggaagcaataaaattaaatagcaattagatttcaaagagcagaccgtaaggtctgtttttttgtggaaaaagaattgagaaaaatggtaccatttactaggtaataaaataaaagttgaggtgagctggttgattagacaacaaaattttccggtaagaacaaagtataagtggtatgacatcaataatttaagtgaagaagacagtgagagattgcagcaggattttaattttacgcctgacattatctcttatatttctgaccgtcacgaacgtcctcactatgactatgacgtccatactaagagccacttgcttgtttacgatgtgccaatttggccgaccaacacgattaagcactttacctcacacccaatcacttttttagtagtgggtgaaaatatctttactttccatacagaatcaaccagctatgtgtttgatgaattcaacgatgaacatatgcgggagcgtttgtctgaagctaaagatgttactgagttgttgatgctctttttcctatattcatcacaatacttccagcgtgccgtaacgcaacttgacgttgaacgtaacagcctagatcagaagttgtctgatgacattaacaataaagatttggtggaactttcgaatattgaaaaaagtttagtttatttatcaagttcaattcagacggatttaatcatgttgcatggcctgaatcacagcaaattagacttcactaaagaagccagtgaacgcttggatgacgtcttgattgaatcaagccagtctgcagaaatggtgcagatttcccagcaggtaactaagactttatcagctaccagtaataatatgatgaacaataatttgaatgataccatgcaattcttaactgtgtggtcattggtattaactattccaactattttaaccggtttttatgggatgaatgttagtctaccaattttaaaaaattcatttgactgggttttaatcattattttgatggttgttttaatggtttggttagtcattttgatgaaaaggcatcatttcttctaaaattgaggcgttttaatgaaacataaaatattaattggttctttaattgtgactttatttgcattcattttgtatacatcaaacataaagcgggtggaaaacgcgcagttaaagattgttgaaccaaataacagcaaggtcgctaagaataaaaagaagaccaaggagccaaaggttaaaaaattagaaaagcctaaggagcccaaggttaattcgattgaatattctaaccatgttaaagctcaaaaaggcagtaatcagaagctagtcaagcaaatcaaaaaagttatgggcattgatgatagcttccaggtagtagcacaggatttaactaactctagtcactttgccgtagtttttaatactaataaggctcatgacgcaggaaaaacaatgcggttatttttactgatcgccttgtatgagcaagaacaaaaaggcaagatggggtcgcgaactgcgattaagattagcaaaaaagacaaagccaagggtgataagatgtttcaagttggtattacctatggtgtaagttatttgcgtagcgcaatgcttaaaggtaacaaaactgcagctagtgccttaactagaaaaattggagttaataatattgaccaagttgctaaaaaaatgggtgccactcaaactaaggtcaactcaaatatgactggccagacaacagctaatgatttagctaaaacaatgattggcttgtatcaaggtcgggtattaaatcggcaatatgctagccgagttttagcaaccctagctaaagagcgaccaagtttagtttctggcttaagtggcggcatttatgcaattggtgatgatgattttgctgtcgcaattgttcagactaacggacgtgcttactgtatgtctgtttggagcacgcaacacaagaattttaataaattgggcaaaacggttaatgcttggtttataaaaaagcataagtaacggaaatgatgaagtccgagaaggcttcattatttttttatagaaaaaataaattatttacactatgtagattgtaatcttcacactgtaggtgtatattatttactatgctaagacaaaggagggatgaaaatggcacagaaaagaaatcttgatctggataaaataattgatcaagctactgaattaatttctaaaaaaggactgacagctacaactttgccagcattggctaaggcgctcgatgtccgctcacagtcgctttatcattacgtttcaggacgcaaacaattgctatcactagttggtgcaagacagattaagatcttacgtcatgagttgatgaacgatctaatcggtatgtcaggtagggatgcattgcttaagtttgcggatgttgtgcgcgactttttattaagcgatccggctttatcaagtattctgtatcatttgaacgaatatccaaaggatgcggccatcaatcaagaaatcttggatttaattaaaatgggtgaaagacttaattttaaaaaagaaagtgtcatttcatttcatgctttaattggcgccgtattagggtacgtttttttggataaatcgaagtcttttggagatgaaacagaagatgaatctaatcgtaattatcatgaaatgattttacggcttgtagaaccagtacctgatttacaacaaatagggaggaaataggaaagtgcagaaatttctgaagaaccatgttttcgaactgattgcgtggattttaatattgattatttccgttgttgctttgcctaacattacgcagctgactaatgatcactctaacattacgttgccaagtaatgtgcaaagcaatgtggcacagtcaatagagaacaattggggctcgaaaaagaaaaacacttatgcagtagcacttgtttttaacaaaaagagtggcaagctaactgatgccgataaacaggctattaataatacgcttgataagttcactaatgataaaagcaagtacggaatcaaggattcattacttccagattccaatattgctacaagaaagaaacttcaatcaaaagatggcacgacttgggtagcacaatttaatgtggctaagagtcatggtacgattgaaaaagtttataacgaaatgaacaaggcctcgaaaacgcaagggcttcgtacttatgtaacgggtgcggatgtcttgcagcacgccttctccgcttcaattcaagagggaattaagaagactgaagccattacagttgtctttatctttattgttttggttatcgtatttaagtcaccaattgttccacttatttcattgttgacagttggtgtttcattccttacttccttctcaattgttactaatttagttaaaagcgccaatttcccattttcaaactttacgcaagtgtttatggttatcgtgctcttcggtatcggtaccgactacaacattttgctgtatgacaagtttaaagaaaatctaggaaaagggatggacaagtataaggccatgcatgacgctttgcgcaatgctggtaaaacaattctttactcaggttcatccatcttaattggttttactgctttaagtttagctaaattctccgtttaccaatcagctgttggtgttgcggtcggcgttgctgttttattggtagtgcttttaacactcaacccattctttatggctacgcttggtaagaaaatgttctggccagttaagaaatttactggtgaaagtgatgacaagttatggcatggtatttcatctgccatattgaagcatccaattatttacttggttgtgttagcagttgttgttgtgccattcatgttaatgtactcaggtcacttgaactacgatgacactgatgaaattgcagattcagttccatctaagcaaggtttgttgatagtacaaaagcacttctctaaagggatggctgaaccatcatacttgtacattcaaagcaagcatagattagacaatgaagaaaatttgaagttaattgatcaagtgactaagcaacttcaagcttcaaaagatgtttcatttgcgacatctgttacagaaccttacggcgaaccaattgatatgctttatgtcaacaatcaattaaacacggttaacgacggtgttgatcaagctcgttcaggtttgggcaaattgagtaagggtgccaacaaggttgctaatggtgccaatagtttgaaggatggtgcagatcaacttcaagatggtacgggtcgtcttcaaagtggtgcccaacaattagttggtggtactagtcgtttgcaaaatggtgcaagccaattacaaagtggtgcagtacgtttacaaacaggtgctggtcgtttggcaagtggtactcacgcacttcaaagtggtgcaagccaattagttagcggtgcaaatcgcttaaagaatggtgctagcagcttgcaaagtggtacccaacaaatggttaaccaattacaacaattgagttcacaactttcaactcaattgagtggttcaaacaaacaacaactcgctcaacttcaaactgctttgccacaaattaacagtggtattcaacaattgaatcaagctgttagtggattagatacttcacaagttggacgattaactgcaagtttgaagaagttacaagaacaagcagcacaattgtcagcagctagtcaaaaagctgctggtgctcaggcacaagcaaaacgagcagcacttcaagccattggcagtgctggcttaactactgaagaccagcaaaaggctgaagcagctattaataaggcatttagtaatacacaagctgatactcaaacgggtaatgctgctatagatgtttctggacttagctcacaattaggtgctttaacttcatcacttcaacaattatcaactctccagactcaagtagctaaattagctcaagcttctaacaaggcacttccaggtgcagctactgctttgaaccaattaagctcaggcttgacgcaagttcaatcagctgcttcacaaggtgtggcaggcgcacaaagacttaattcaggtgctggtcaattaagcagtggcttaggttcactttcgtcaggcgctagtcgtcttggtgcgggtgtaaaccgacttaacaatggcgcgggtcaattgaacacaggtcttggcacacttgcaaatggtgccggtcagcttaacagtggtatcggccaattagctggtcaagctccacaacttatttcaggtatcagtcaacttaacacaggtgctggacaactcagtgctggcgctggtaagttggcaagcaaagttccacaattgacttcaggtattgacactgttaatagtggtttaggtcaaggtgaaacctacctcagaggtttaggttcatcagctgccgctgatactttctacatccctaaggaattcttgaagaacgatatgttcaagaagtcaatggatgtttacctcagcccagacaagaagtcagctcaaattattgttgtctttgattcaaacccaagtgcaaccgaagctactaagaagtcacaagaattaagtgctatggctaagaagtcattccaaggtactgctttgaagaatgctaaggtagctatgggtggtcaaagttccaagattgaagatactaagacagttgccagtggcgacttccttagaactgctgccatcatgttaatcggtatcggcattgccttgatgttcgtaactcgttcattattgcaaccagtctacattcttggtactttacttattgcttatctctgctcactttcaatcaatcaatggattgttaaagcagttcttggtaagtcaatgcttacttggaacacaccattcttcagcttcattatgttgatcgctttgggtgttgactacagtatcttcctgatgactcgttatcgtgaacttgagtctgaaggatacactactccaagttcaagaatcttgaaggcatgtgctatcattggtacggttgttatatcagccgcaattatcttgggtggtacttttgcagccttgattccatcaggtattccaactttgattgaagttgccttagccgtggatattggtttgctcatcttggtcttcattttgccaattactatgtcagcagctactaagttgacatatgagggaattgaccttaataagttcgccaaaagaagaaataagaaaaataattaataaatagtttttcgaccgaatcgcaatgattcggtctttttttgttaaaataaatcttgaaactaatagtaaaacagattatgattgtataatattaataggtacactaaaaggagttggtaattatggtaggtattgttagaaatgctgagataacatttaaaaatgaaaaagcatttaaagaattcaaaaacaaaatagccaatccagtaccacgtgtgtctataaaaaagttgcaaaaagaagttgaagctgatgggatagtaattcaacgtgggaaggaaaagcatgaatcaaagtagagcatttaaattatgcccgttaagtacgtgtccacattttgaagagttagccctacattttgattccactaatcgtggtatagataatttttttcgtaaggaatgtccgaagttcgaaagtacacagaaattaaagacttttgtattaatggatcctatcaaaaatcagatagttggttttttctcgtcaacagtagggttattaacacagaatgttaagaaggatgatggtacttataaagttgatacaccatatataaaccttgcttattttgcaattgacaaggaataccaaggaacaggaattggtagagcactaatgatggaattcttttccatgtgcatggtgattgcattgtatacaggtgttcagctgatttatcttgaatctgtggacgaaagtgttaatttctacaaaagattaggatatgaattattacataaagatgcaactccagaagcatatcaaaagtttggaaatgatactaggaacatacaatttccaatgttgagaaagatatcagatttgattgctgatggacattcaccttatattgataatgttttaccaattaatgttgaaaaatagttagtaaataattttttcgaccgaatcgcaatgattcggtctttttttgttttgatcttcaaattctgatacatgttataataatgactaacagattgaaaaagaagggaatttttatatgactacttgtccaaattgtggccataaaattagtgaaacagatgatatttgtccaaactgtggcttcaatctaaaaaaatatcgagacgactttttcacagatcagcaccaaaaagcaaagtttgaagaaccagatgaaggcgaaaagattatcagccgtgcagcctatcgggaagaatttattcctgaaaagcaaaacaccactgtccaaagaatgattgcgtgggttaggaaaaatgcgaccttagtcttcttattgggagtcttacttttaatcctaatgagtttttctagagcggcagggtggactggctttttagccctaatggtttggctttatattgtgtgtgatcgtaaagataagatcgagcagtatacggttgataagcgattaacgcaaaagattgaccgaattggttccgatgtctttaaccgggtggatgcacgtgaaagtaaagtcaaagcgaaaaaccgagaatttgtgcaaaaatatcctcggattgaaaatcatgtacgtgaaataaaaaatgttcgcaaacatcactttaattatgtgcagatttcagttatttttacggctttagttagtctaatcgttctctttaccgactcgggtgcctcggcttacacgcagagaatgtctatttccaatgtactgttcggtttagcagggcgcttgctttcatctggcgtgacatcatggtatgcacttattctttacattgtctggttgctactattcttgttcccaattttcattatttataatattttgaaaaatactaaggctagtcagactttggccttcttcctttctttgattgaatcaatctttttgatttatatgatttttcaaatatcaagcgcggcacatgcttcaactggggtgctggctcaattgacgagtcaacttatgtcatatgcagtttctctcggagcttcagcttactttatgattttggctagcgtgttgaccacgattttggctggatataatctttttaaaaagaaatagaattaataataagtaaaagaaatacgctggttaagttgccagcgtattttctacccaaagtcaagtattatcaatgatttaagaaaataaatttacttgttttaatgatgcgaataaggttaaagcaaataagagtttaaatttaagaaaaagcgaaagtaccacaaataagcctatgaatacttgtagtttttccataggttgcttatacttaagttgattatttgatttcagctaaagtcttttattttcggtggctatgttgtaatcatataattgatcatgtttgataagagcaaacattgtgcgtatcagtttatggactgatgcaatggcgattttcttatagccttggctatttgaagatcgttttttcttgtcataataatcagttatatggcaaggctgcgtagcctttaccgtctccatttgaataataactcgataaagtatttttctggcaatatgattgccatgcttggtaatgccaagagaactgtctttttcaccagattggtaccttcctggatcaatgccaacaaacgcatcaatttgagctgaagtgctaaaccgtcttagatcaccgagctctgctactaatctcactgctgtaattctagcaacccctgggatactcaaatagatggataaagcacgagcgtttactgctttagccagcttttccatgtagttaattacatagtcgcgttcttgctggagtgaaaacaaattagaaatgttcctttgaatagctctaacgataatactatctttggaatcataaggataagcttctctagcaaaagcgtataatcttgtggttaagtaccgtgccctttgttgtcctattccagaaatagaattaagcatttgagttacctgtgtctcattcttttctagaacatatccagcatgtgggaaaagactaacaagcgcccaataaattctgccagatggatgagacagtatttcttcaatttgtgggaaagtggattggaggttgcggtgcaattgatttttagtagtaactatactcctagtaagttcttcataatagcgactggcattctgaagttcatgatactctctgggctgtggatcacgcaacttttgcggggcattaaattgaattaaagccaggcgataagcatctaccttatcagttttattatggcgtaaattattgtccattagctttttcgctttaagcggattaagcttcaaatacttaatatgataatcctctaagaaagcttgcaggcttagagaataaacaccagtagcttcgaaaacaactaaaggagttatcaaatattggttcagttgctcataaagtttttgatagccaaaggaatcattagagattctaaaagattcgccttgtttgatccggtcattaaccacacaaactgtggaagatttactgctaacatcaataccgaaaataatttgtgattccataatataacctccgctgtgaagataaacctctttatcaacctattaattctaattttctaaacacggcatctaagtgcccacagacttcgaagagacttaagaataggtggtaaagcagtccgtttcttttacgacatcaagtgtctaaaaagctgaagacttgatttgctttatcttcactttctattttagacaaaataaaaagtgccagatcgtgaatccgtcgattcatgatccaacactaggttagtatgtttcttttatcgaaaaattactattgattattcttagtaacatcaattactaagtgttcgttaacaaaggccatcatgcctaagtcacttaattcacgaccgtagccagacttcttcacgccaccaaatggcaattcaccagaggtaatccagcggccattgatgacagtcataccagtttcaatttgagcggccacgttttgagcacgtttgatatcgttagagataacagatgaacctaagccatagctagaatcatttgcaagctgaatggcatcgtcatcatcgtcaactacaaagacttctgctacagggccaaataattcttcatcataaataggattttctttgtcgatgttagtcaaaattacaggtctgaagaaggcacctttagaatcaatctctggatattggtaaaaaatctcggctcctgcgtcaacggcctttttaacctgagcttctaatttttccttggcacgttcggaattcattggtggcaaggtagtaccggcttcaagtgggtcacccgcttgaagattagaaaagacgtttttaagcgtatgtagcacttcctcataatgagatttttcaacaataattctcttggatgaagtacatacctggccatcgttataagttctagcatcgcctaaaacgttacgcaatacttgcggatctgcatcatctaaaacgataaatgcgtcattgccgccaagctccatggttgatttctttaaatttttaccagcagcttcggcaacagctgaaccgccacgttctgaaccagttaatgcaacgccttgaactctaggatcggcaataatatcgcttaattgatcataggttggataaaggttaattaagctgccttcaggagcaccagcacgtctgatgattttagcggttaaagcagcagaacctggaacattgtgggcgtgtttcagtaagattgggttgcccacgataaagttaggagcgaagacccgaataacttgataaagtgggaaattccatggttcacaagccataataacgccagttgattgcttcaaataataggcattgcctaagtctgattcgattggagtaggagccaacattttgaccccgtttttggcatagtaatcacaaattgaagcacataattcaacttcttctcttgattcgcgcaaaagctttcccatttccagggtcatcattttggctaagtcatcttcatgctcgcgcaaagcatctgctatcttgtgtaattgacgactgcgggtctcaggattttcatgacgccattttttatataaagcgtgtgctaagttaatggcatcgtcaatttgtgcggcagtagaattgtcatagcttgcaaattcttcgttagtatatggattaattgattgatatctagacaaaataattcctccaataagttttatgtttagctttaataagttatgtttctattataaagcgtttacaatgaaaacacagctattgaaactgtcaaatcttttgtgtaaatagttctttctcgtaaattgattttttaattatttatttaatcaaagtaggattctaaggtgtcctgaacctgaccaaagcctttatgaattcgattgaaataacggtcattgtagctcattgcctgaataccaataaaagcatcaagcgactgttcagttggaaactctgccttaggcttagctttgcgcttgatcacattgttaaatgattcaatcatgttagtcgaataaattgaagctctgatctgcttgggatagttataaaagaccagcagatctggttctatgtctttcaagcttctgataacatggctgtaaaccttgccccatttggtatagaagtcatgcaggacagctgtggcttcttctttgtttgtctgttgatgcacctgtttgaattcgttcatgatcttttcacgatcgtcgacgcgtactttagcgcagatattgcgcatgacatgaaccaaacagcgttgaaaatgagctttaggataagtcctggccaaggctgttttcatgccaacaacaccatcagaaagaaagagttcaacttgcttcaagcctctggacttcatgttttgaagcatctctgtccagacttcaatgttctcactaggagcaatgcagtagtcaatgacttccttatgtccattaggtttaatgccaatggcaatatagactgcttcacgctcaaacgtttctcggcgcaaaggaaggtatgtcgcatccaaatagacgcagaaaaacttgtcgcttagcttgcgtttgtggtaagcctcaacctttggaatcatctgcttggaaatatttgatacctgagctggactgtaatggctgccatacatcttttcaattagatcggctatttccctggtggtcacgcccttggagtaaagcttgataatcatgctttccaagatatccgagtgctgcttgtagtcaggcagcgtgtgctgatgaaattgaccgttgcgatcccgaggcacttgcacttcaattgggccaaattgcgtatcaactttgcggaaataagcaccatttctagagttgccagtattccagccatttctggcatagggatcatagcccagaaaggcagtcaattcagcttctagcaagttattaacagcctgttgtagttctttgcgcaataaatcatttattttgtctggattgaatagagcttgagcaaaatctttggtaaaatcattcatgaaggagttcttctttctgtatgtgttttttttgttcaaaccaatcatacgagaaaggaactcctttttctaatgtttaaagaaataaatttaaggaatcattcatccttacacaaactattttacagtctccagctatttgtgcttttagttgtaaaaaagtcatgctaaaatgaaaaataattttattttgtaagttttaaacattgaagggacaaaagcatgaacaaacaagtttcaactgctaaggtttatttaggcactccattttacaatgatgatcaacgtgctcgagttgataaggctcgtgccttgttagaagaaaatccgacagtggtcagagtgcattttccatttgatcaaaattttgttgatccggatgaaaagaatcctgaaattggtggcattcgcagcatgacttggcgccttgccacttataacaatgacctggaaggtctagttaactctacatgtggcgtcttcttgtatgacatggacaatgtagatgatggtagtgcttttgaaattggtttcatgcgtgctttgcataagcctgtagtcttggtaaccttcactaaggatctagacaaggataaagtaatgaacctgatgattgctcaaggtgttactacaattattgatggtaatactgaactggacaaacttgctagctttgatttcaatacagtacctgctaagccagttactggttacaagattatctaaaaaaatccccattttgtaggcattttcactacaaatggggatttttcgaattctttttttaaattattattcttaatcttagcttaattattctaataaccaatctaaaatattaagttgctttattccgttaaaattatcatttttgccaaattcattcattgttaatagaaattttggataatgatcattaatcttgttaaacggtttcaattcgcgctctaaggtcttttcatctagcactgtttcggacacttgataataaaaaatttcgttattctttcttgcgacaaaatcaatttcaccattagggatgctacctacagtaacgttatatccacgacgaagcaactcaagataaacaatattttcaattatatgtccacgatctttttttgatttgccaacaaatgatatctaagcccagtatcaacaatgtaatattttttttagcgaacctagctgctcttttccatgaatatcgaatcgtgaaacgtcatagataatcaaactgtcgagtaacgcattaatataccgttctaccgtatttggtgtgattttatgtcccattgaagttaacgtattggcaatttttcgaatggataaatagctaccaatactgtcaaacataaacttgataattcgttccaaagtcaacctatctgaaactcctaaacagcgttcatttatactaattttatcatttttgcaaaatcaaatgaacaaactcttattactatatttcaaattggatcttagtcatttaatttttttagtaattttttagcctgatttagcgtaatcgtgttgcggttgattcgggcaaaagcacaggcatcgtgcaaatgttggatagcaattgctttcttttttgactgatcaatatcattcatgccttgccgcaataggatgcgtgccatgtaaaaaatcacgtgcttctcagcgccaatcttataggcatagcgcaataatgcattagactcacgatacatttttcgttcgccatagaattcaccggcatcacataaaatacttaaggcatgcattgtagtcaaaatattatcgatcttgacgtccataatgttctttaatacttgactataatagtgctcggctttctctgtttcaccttgtttagcatagatttgactacaaccatttaatgccaacaagcggtaaatatcattttcaggcaattcctgggtggtcaagatattgttgaaataaaagagcgcactcatttgattgcgatcacttcttagagcatattgtccgcgcaaatagtgataatgaatccgatttgtttggcgttttaggtctacttcggggttgatttgtgaaagtaaagtaaaaattttactgtaatcaaaattgataaaagcaaaatccgcttcaaacaggatatgcgcgatatatttgtgctcactgttgtccataatatcgctaacatcaatatccatccgttcacaaagctgcttaagaattttaaatgaaggtacctgtccgttgttttcaaacttacttaaggtcgactgggtacaaatacattggcaaagctcagtttgtgataactttagtttctttctgacttgaacaaatttttggatgttaatcatacttaattttgtctcttaatagtttgatataaaaaatcgagcgattcgtctacataatcgggaccataggccatggcgtgaccgtgaccaggaattacgaggagctgtacgcctaagtttttgtcagctaagaacttaacaaaatccaatactgtagctagtggtgtcaactcatctgcggaattaatcatcattaattgcttgagatggccatagtcaaatgacttagcgtctaatttctgtaatacagcctcatcttcagtacctgtgtaggttaatgtgaagtacttgtagaaagattgtctgatcttttcaggatcggtaatgccaaaatcgttagcggcatctggggatgctttagtatcttgatgatctttaatccagtttgaatattcaactggagcggaccaggtgacagtagggaaaccgtatttcccagcaacctcaattgccatttcaccgccaacgctggctccaatttgaacaatgtttttgatatcgtcttgatcagtgtattcagaattcaacagccagtcgacaaagtgcaatgcatcttcatgagcagcaggaaagtggtatttaggtgctaaggagtagtcggggatgaaggtcataaagcccgcattagcaaagcgaatacctagatttttgacgctgtctttatcacctctaaaccagccaccgccatgccagaagattaaaatcttggtattagaagatgtatcattaggatagtaaatatccgtttttaattctttagtcttgtcataaacaatatcattcttaattacaaccataagatgcctacctttctaataacttattaactttattatatagtatctgcccaaagtagctaaaataataaaactttttttagatttgcatgtttacggtatctgggctggatttttgttaaaattgaactactaggcgatgaaggaaggcgagaaaatgcatctatcgactaaggctagtcgtaaattaatcaatattgcaactatagtttgtggagtcgcaatcgtgttgctggtgatttattggtaccgcttggggatctttaccgatcaagctaaaatgcgggcttatctggctaataaacaaattgttggtccgattattttcgtgttgattcaaattgttcaggtagttattccgattattcctgggggcgtgtctttattaggaggcgtggtcttctttggcccagttgctgggtttatttataactacgtggggatttgtattggctcaattatcaacttctttttagctagacactacggccggccctttattttgcatattgtttcggaagaaacgcttgataaatatatgaagtggacagagaatcagaataaatttaattggttctttgcattatgtattctcgccccagcagctcccgatgacgtgctttgcctgctagcaggattgactaaaatgaagttttggacttatttttggattattattttgtgtaagccatggacaattgcggcctatagtataggcctacagtttggtgcaaagtggctcttgaagctgatgggtaactaatgcttgaatctaagagaatatatttgagaccttttgaagaaagggacgcgcagcaattactgaagtggggtggcaatccccgctaccacaagatggctggctttgaggaataccgcaatctgactgaggcggttaatggcgtgaagcaatatatgtcgcgtcctgaaagttatgtcgtttgcttgcgcaagaacaatgaagtgatcggtctggttgaattgtatgaacgcggcttagatgaaaagagtggcctattaaagactaaagaagttggctttttgctagatcagtcgtttgaaggtcacggctatatgactgaagctttacgattgattttgacctatgcttttaaaaagaaaaagcaagtagaagtctgggctggaacttttgccgataatgaaaaatcacagaaattgcttaaaacactaggatttcagtatgtttatactgtcgattacacacaagttagtgcacttttttcgtttaaagaaaaatattatttgctcaaaaaagaagaatggcttaaaataaatgcaaacacgaaatcctaagactgcttcagagagttcacggttggtgcgagtgaatgcatagtcgcttccagatttcaataatgtgggcaattaatagttgcacggtttgacgtcgttactcgtctggtaaagaggtgcagtctagatagactgaagctgggtggtaccgcgaaaccgtgtaagagccgattcgtcccaagtgtagggataagtcggctctttttttatgcatatcatggaggttttatatgcttgatattaaggtgattcgtgagaatcttgactggtcaaagaagaaattggctacgcgtggcattaagccagaagaattggatgaattagttgaaatcgacactaagcgtcgtaaggatttgactaagagtgaacaattaaaggctaagcgtaacgacgtttctaagcaaattgcagaaaaaaagcgtaacaaagaagatgctagcgatgcaattgctgctatgcgtgaagtaggtaaggaaatcaaagacttagataaggaagttgcggaattaactgaaaagcaaaactacatcttgcttagattgcctaacttcccagctgattcagacccaattggtccggacgatagctacaacgaagaagttcgtaagtggcacccaactactgaatttaactttaagccaaaggctcactgggatattggtactgaccttggcatcttagactgggaccgtgcttcaaaggtttcaggtgcacgttttgtttactacatcggtgctggtgcgcttttggaacgtgctgtcttcaacttcttccttgatgaaaacactaaggaaggttataccgaaattatcccaccatacttggtaaacgatgcatcaatgcaaggaactggtcaattccctaagttccacgaagatgtttataccatcgttgataatgacgatccagataagccacgtgacttaactttgatcccaactgctgaagttccattggtaaactacttcagaaatgaaattattcatgaaaacaagttgccaatcaatgttactgcattgtcaccagcattcagaagtgaagcaggttcagcaggacgggacactcgtggtttgatcagaatgcacgaattccgtaaggttgagatggttaaggtatgtaagcctgacgaatcatgggatgaactcgagaagttaactcataatgcggaacacttattgcaaaagttgggcttgccatatcacgtagttgctctttcaactggggatgcaagttttactagtgctaagacttacgaccttgaagtttggatgcctgcacaagacaagtaccgtgaaatctcaagttgttcaaactgtactgacttccaagctcgccgtgcacaaattcgttaccgtgatgaagacggcaagcttcacttggcacacactttaaatggctcaggtttggctgttggtcgttgtgtagctgctattttggaaaattaccaaaacgaagatggttcagtaactgttcctgatgtacttgttccttacatgaatggtatgaagaagattactaaggaatcaggtttaatttaagtaattaaagattaaaaaagcaaaatcgttattttagttgttgtgactgacaacttaaaataacgatttttttgcatataatttaagcctgctttttgttgtgatttatgttaggcgttaaaatagatgaatagaataaaaccgcgtaatagaaagactaaataaaaatgactttgaaggcaagcagcgctttagtattagaaaattgaacattggagtttgttccgttttgctttcaactttgctttggacgatgaatacaagtcaaacggttcatgcggatactacggatccagtagaaacagaagaggttgagtcggctaagaagactaccacagatactggaaatgatcagactacgacagctggtaagaatgataacgatactactgctcaaaaagaagttagcggtaccgatcctttgactagcaaaaattcaaccgagcagaattcaactaaacaggcagaagataaaaaagctactagtctagaagatactaaagatgtttctactcaaaataataaggaagtttcttatagtgcttacaataagagcggcgatccaggtcagcaaaccaatttgtttacccaacttggaataaggaagatacatctagtgagggtaaggagtctctagcatatactgagaacgcctcagtttatgaagcccgtccagttcacactgttttgtatattccagtaaaacagcaagcgagaacagtaacggctaaatatgtaattgctggtggtgacaaaaatggtcaacaatttgcacctgattcacaaatacaggtattctatgcccagactggtagtttaaatgttgctaataacacgattacttatggtaattggcaatgggatcaaacagcaggtgattcaacaacgccaggatttaaagtgatttctggttcatggagtctacctaaagaagctggacaaacttggcaagttaatgttcctgatccaggcaaagattatgttgttgtaaatatacgtatggtaaaaatagtactaatagtactaatttaagctacactgctaaagatggtgacttgatctttgatcaaaccccaggcaatgtcggtgaataccacgtggaattatctgcgcaagggttggctaacattgaaaaagctttgggtactaactacgcatacccacaagtagcagctgatgtaactactaagggtacattaaccagggcgaagctactgttaccctgaatagtggtgacagcaagacttatgatgctaagcaaaccttaccaagtggacttaacttgaataagtacaacgtaacctacgatgcgacggtttactccgctgatggtgaagctcagacacttaagttaactgctgacgatttgcaaattgttggtaatgcaacgaatgtcggtacttaccaagttaaattgtcacaggctggtcaagaaaagcttaagcaactaactggtaataatggtgctaactacaagtggacatttaagacaacagctaactacatagttactgcagccactgctgacgcaaaacttaatggctctaaccaaaagacatttgatggtacagctgtaacaactgcacaagttaacagcaatggtcaaattttagttcactttactttcccaggttcaactaccgaaagtacgtatgctctgcaagacggtgattatatttggaatgctggcagcgcaccagttaatgatggtacttacacgattaagctgagtgccaatggtattgttaacttgcaaaaagcccttaaccaatacgctggtcaaggaaatgtcaccttggatgctgaagacctgctaggctctgccacttacacaattaaacaaaaggatcttaatgtagttcttgacggtaatagtaagggcgcagatggcaagacgtacgatggtcaacctgcaacgattaacactcaagctaccaacttcggtgtattcactccaactggtttagtaagcggtgaaatgttgaatactgctaacctagcagctggtgattatgaatgggtcgatgccaatggtaagccaatttctgcgccaacaaatgccggtacttactacattgccttaactgctaagggattgaagaaattgcaagatgataatcctaactatgcagtttctgaaagtggtcaattcacttatgtaattagtccagctgaagaaaatgtaacgatttctggtagtcaagaaagcactgtaccagtaattgatggaacaaactttaaagttaatgttccaactgctattacagttccggcaggtttgacttatgaatttgcaaatggaattccagctgaatctggcgtttatgtaattaacttaactccagaaagtattactgcccttgaaaaagcaaatccaaactacaagctgaatatttcttcaaaggctaagtttactttggatgcaactttaactattgaatttgaagatactcaagaaggtaacaagcaagttggtcagacaattactaagtctggcgttgctggctcaactgttgataaccttgatttgaagcttccagagaactacgagttagcaccagatcaagaattgccaactagctcagatttcagaagatcaaaagaaacagaccgttgaatttacgcggactgccgtatatgacttggttactggaaagctggttgccaatagtgaagtcactgctacttatactgtcaacactcaaacggggaagatttcttacgttgatagtgatggcaaagaagtagggcaaactccgcttagtggcaagaccagtgaaacagtagatgtaaatccacaagctctagcaggatggaagattgtttcaggacaggatatttctaagacagtagttgcaactgctgatggcattccaactgtaactgtaagggttgaacacgacaccattatcgttactccagaaactccaccaagggatgttccaacaggcccagtgcaaggtgatccaagtaagaactatgatcacttggatacttttactaagactccaactagaataattacagtcattacgccttcaggtggtaagctgattaccacgcaaaaagtaacgtttgataaagttactggcaaagttacatacagtgagtggagggtagatggtaatactcagtgggatgcatatactgctccaacatttagtggctacactgcttcacaaagtaaggtggcagcggaaaaggtttcagtagatacggctgacagtaatattaaaattacttacaagcaagatgaagtacctactccggaaccagaacctcaaccgaagccaaaaccaaatccagagccgaagccagataaaccggcaaagccaaataaggaaagtgaaaagaagcataatcattctaaagcaaataagaagggctatgactctaataacaatcctaagcatgaaggtatgcctacaggtcgaaagaaacgcgctaacggcccagttaaggcagcagacattgaatctggcaagaggacaatagggaaaacagaaagaaagcaattagctaacaaattaaatgcaaaaccgaagtccgtgcaagatttattgcctcaaactggtagtgaacacaaacacacactaggtttgattggtacattactcgctggtttaggttggattagtttacttggcgttgaaaaacgtaagaaaaaagatgaatagacactaaagattgatcatctaaagatataaaatgagacgtttatcgaatgattatatttgatccgtaccgtgtcaagtagacagcttaaatatataaattaatttgattaatcagttcgctattgtgcgagctgatttttcttttcatcaatctttttccaaaagtctttatatcttttatcttgttttattggatatgaaattatattctctggattattcttagcttcttttctaacctgacctgcgctcttgccattgaagcgctcctgaggatcataattaatatagtattacgcgtggtgctagttaaatcgttttagttaataaaaaagtccaattagactagactcaagttgtaagtaatttaaatagaaaagagtctgatctaattgaactatctcaagcttaatcgtttttctcaccatttacaagttagttttaatcggttaaatgtgatttgtcgctcgctgtataagctttatgcgcctgatggacttaaacatcgtaaaaatgttgatcagaccaagcttcctgatagttctatcttagcgatgctcatttggcaaactgaaattggaattgaatctcaacgaagattctgtaaattcttcgttggcttatctcattctcgttttaaccgtcgagctcgaatgctcttgcctctaattcgttgtatccgtcagggttggaatcaggaagtaaaggtaggtggagaattattgattatcgacagttttccgattccagtttgtcagcctgttcgcaattatcacgttaagatcttccgtggcatagccgatattggttataaagcgacgaaaaaaatctactattatggcttcaaagtccacgcaatagtgagtgatgatggctatctgcttgactacgcagttactaaggcgtcggtacatgatgcaaaagagacggtagaattgatgatcaatgctcatccaattaaccattatcttttaggagatgaaggctatttaggaaaagacttagcagccaagctaaagcgtatgggatacgtgctttggacaccatatcgtaaaaacatgaggggtgctaaaaagcataatgatcatcagttaatggcaattagaagaacaatcgaaagcgacttttctttgcttagctattacaatgctgagaataatcgagccaggagcttagtaggttttcaacaacggctagaaatagctattttagcttataatatgacatattgtctagaacgatttaactagcaccacgcgtatagtattcaatacttgctttaaaggctttttccatctcttcatagctatttgccttcggataaagaacttctcgcatttctttaattaaaccttgccagccttccattgggccattatcaatacagcggccaattctagacattgattgtggcatgccatgttcttctagctcatgcttaaaaggcatcctggtaaattgaaatcctcgatcactatgaagcattgcatgactattgggctctcttttccaagcagttgacagagcagcgttaactagggctgtatcattgcgcttgcttaaagcatagccaacagggaaacgatcatatagatcaaagatagtacagagataaatcttttgacttgttccaggaattttttcttcagtaatgtcagtgcaccatttttcattgggtttagtggcattgaagtctctatgcaatagattttcggcagtttcttccggtctagcagcttgatagcgatacctcttattaaatctggccttgctagtatagatgccattcacgcacatcaagcgagccacagttctacggtatattttggcctcaccgtctgctagctcattgtttaaagccaaagtcatcttaggagaaccaaagaggctgttattgctctcagctatttctttaatacgcttaagaatcttttgatctcttagttcacgtttgcttggcttatgattaagccatttgtagtaggctgaccgggcaatattggcttgtttgcacatccattcaattgaccacttatattctcggtgacattctttgatcaaactgtaaagagaatttcgctgctgttgtttaagtgctatttgtctttgttttggctgtccagcaaacacatcctttctaattccttcactttttttaggaaggctatctcttggtctttaatatcattttcttttttaagctgttcaatttcacgctttagcctttgagtttcagatagctcagcttcttttaaacgatgaccgcgcctatctgctaagccgtcagttccctttgcgctgtatttttttgaccagttgtatacttgggcatagctgcagccaaatttaagagctgcttccttgtagttccattgatgatccttgcagtatttcactatctgtttacgttcttctagggttgtcttttttctcttagtcatataagcctccagaataggattgtagtccttgagttcttgatgactattatacttgataacccactgctttaactgtgcagcacttcgcaaaccaaacttatttgttagataatcatatgagccttcgccatttaaataggcagctatgcatttgagtttaaaatctttactgtatctttgattatatttatgtggtcttaatgcttctggcccatgatctttaaatgcatatacccattggcgcagtgtagtcttgccagcccctaaaactttcgcaattgaagcaggtgatgcttcgccacttatgtattgtttaactgctttaagcttagcttcatagctaaatttactttttctagacatacaaaaagtcctgctttcatagatagtacaattttatatatttgtactgtctactaaagtaggactatatcaatttgataaacgtctttttttgcatttttgagtgaaaaattaggcaaaacactgttttttgaattattttgaaaaaatttcgaaaaattttgtactaaaattaagagaaaaaacagtaaaactcgaataataagcgtaaggataaaaataaagtaagcaaaaagaaaaaggtagattgaaatagaaataaagaaataattacagcgcgtccaagcgtttctaaaagattgcgaacgaagagcaagacttgccaaagcggagaaaataaggtaaattaataaagtcgcttcgagagatgcgacgagagcttaaaaacagacatgcagggaaagaaaacaaataaaaagaaaaaagtacttgcaaagaagtaaataagctggtaatatatttaaatgtcgtcaggtgaaagcagaaaaagcttgagtaagacgaaaaaacaaatcaaaaaagttcttgacaaagaaatgatggtttgataaaatataaaagctgtctgctttgcaaaaaaagcaagacagaggtagtactttgaaaactgaacaaagtttcgctaaaagtgtgcgggtgtaaaaacccaaacaagaagcgaagtcaattcgcaagcaataaatttgagacaaagatcttaaataaggaatgagcaatcattcaaactttttaaaatgagagtttgatcctggctcaggacgaacgctggcggcgtgcctaatacatgcaagtcgagcgagcggaactaacagatttacttcggtaatgacgttaggaaagcgagcggcggatgggtgagtaacacgtggggaacctgccccatagtctgggataccacttggaaacaggtgctaataccggataagaaagcagatcgcatgatcagcttttaaaaggcggcgtaagctgtcgctatgggatggccccgcggtgcattagctagttggtaaggtaaaggcttaccaaggcgatgatgcatagccgagttgagagactgatcggccacattgggactgagacacggcccaaactcctacgggaggcagcagtagggaatcttccacaatggacgcaagtctgatggagcaacgccgcgtgagtgaagaaggttttcggatcgtaaagctctgttgttggtgaagaaggatagaggtagtaactggcctttatttgacggtaatcaaccagaaagtcacggctaactacgtgccagcagccgcggtaatacgtaggtggcaagcgttgtccggatttattgggcgtaaagcgagcgcaggcggaagaataagtctgatgtgaaagccctcggcttaaccgaggaactgcatcggaaactgtttttcttgagtgcagaagaggagagtggaactccatgtgtagcggtggaatgcgtagatatatggaagaacaccagtggcgaaggcggctctctggtctgcaactgacgctgaggctcgaaagcatgggtagcgaacaggattagataccctggtagtccatgccgtaaacgatgagtgctaagtgttgggaggtttccgcctctcagtgctgcagctaacgcattaagcactccgcctggggagtacgaccgcaaggttgaaactcaaaggaattgacgggggcccgcacaagcggtggagcatgtggtttaattcgaagcaacgcgaagaaccttaccaggtcttgacatctagtgccatttgtagagatacaaagttcccttcggggacgctaagacaggtggtgcatggctgtcgtcagctcgtgtcgtgagatgttgggttaagtcccgcaacgagcgcaacccttgttattagttgccagcattaagttgggcactctaatgagactgccggtgacaaaccggaggaaggtggggatgacgtcaagtcatcatgccccttatgacctgggctacacacgtgctacaatgggcagtacaacgagaagcgagcctgcgaaggcaagcgaatctctgaaagctgttctcagttcggactgcagtctgcaactcgactgcacgaagctggaatcgctagtaatcgcggatcagcacgccgcggtgaatacgttcccgggccttgtacacaccgcccgtcacaccatgggagtctgcaatgcccaaagccggtggcctaaccttcgggaaggagccgtctaaggcagggcagatgactggggtgaagtcgtaacaaggtagccgtaggagaacctgcggctggatcacctcctttctaaggaagcgaaggatatggagagcaggaatgctaagagaagtatccagagcaagcggaagcacactgagaaactttgtttagttttgagggtagtacctcaaaaagagctagtacattgaaaactgaatataatccaagcaaaaaaacgagacaatcaaagagaacagattgtagagcgaccgagaagagaattcttgagtaaggtcaagtagaaaagggcgcacggtgaatgcctaggcactaacagccgaagaaggacgtgacgaactacgaaaagcttcggggagcggtaagtacgcagtgatccggagatatccgaatgggggaacccaatgcagagatgcattattgattagtgaatagatagctaatcaaaggaagacgcagtgaactgaaacatctaagtagctgcaggaagagaaagaaagatcgatttccttagtagcggcgagcgaagaggaaagagcccaaaccaagtgatttatcatttggggttgtaggactgcgacgtggcagtgtaagagatagttgaattatctgggaaggtaagccagagagggtgagagccccgtaagcgaaatctcaagcacgcctagcagaatcctgagtaggccgggacacgaggaatcccggttgaaaccgcgaggaccatctcgcaaggctaaatactagttagtgaccgatagtgaaccagtaccgtgagggaaaggtgaaaagaaccccggaaggggagtgaaaaagaacctgaaaccgtgtgtctacaagtagtcaaagcacattaaagtgcaatggcgtgccttttgtagaatgaaccggcgagttacgttatctagcgaggttaagtcagaaaagacggagccggagcgaaagcgagtcttaatagggcgaaaagttaggtgacgtagacccgaaaccaagtgacctacccatgaccaggctgaaggtgtggtaaaacgcactggagggccgaacccacgtaagttaaaaattgcggggatgagttgtgggtagcggtgaaattccaaacgaacttggagatagctggttctctccgaaatagctttagggctagcctcgtggagaggataatggaggtagagctctgtttggactaggggcccgtcaggggttactgaatccagataaactacgaattccagatatccatacacgggagtcagactgcgagtgataagatccgtagtcgaaagggaaacagcccagatcaccagttaaggtccccaaatctatgctaagtggaaaaggatgtggagttgcgtagacaactaggacgttggctcagaagcagccatcattcaaagagtgcgtaatagctcactagtcgagtggcgctgcgccgaaaatttaccggggctaagcatagtaccgaaactgtggatgtgttttaaagagcacgtggtaggagagcgttctaagagcggagaagttgaatcgagaggatcaatggagcgcttagaagtgagaatgccggtatgagtagcgaaagataggtgagaatcctatccgccgaaagactaaggtttcctggggcaggctcgtccgcccagggtaagtcgggacctaaggcaaggccgagaggcgtagtcgatggataacaggtagagattcctgtactgtgtcaaatcgttaagagcgaaggagggacgcaggaggtgaagcacgcatcgcgatggaacgatgttcaagcaacaagtgcggttaagagtcaaatgcttctaaccagcaacacgagttgtgaagaggagtgaattaaaagtagcgaaggtgtggtaatcacactgccaagaaaagcttctagccagagatgacatacccgtaccgcaaaccgacacaggtagtcgagtggagaacactaaggtgagcgagagaactctcgttaaggaactcggcaaaatgaccccgtaacttcggaagaaggggtgctagccaagagattggttagccgcagtgaataggcccaaacaactgtttatcaaaaacacaggtctctgcaaaatcgtaagatgacgtatagaggctgacacctgcccggtgctggaaggttaagaggagagcttagcgtaagcgaaggtttgaattgaagccccagtaaacggcggccgtaactataacggtcctaaggtagcgaaattccttgtcgggtaagttccgacctgcacgaaaggtgtaatgatttgggcactgtctcaacgagagactcggtgaaattataatacccgtgaagatgcgggttacccgcgacaggacggaaagaccccatggagcttcactgtagcttgatattgagtatcttttaaacatgtacaggataggtaggagccagagaagataggacgctagtcttattggaggcaatgttgggatactacccttgtttgaaggatgctctaacctcgacctgtaagccaggccagggacagtgtcaggtgggcagtttgactggggcggtcgcctcctaaagtgtaacggaggcgctcaaaggttccctcagaatggttggaaatcattcgcagagtgtaaaggtataagggagcttgactgcgagagagacaactcgagcaggtaggaaactaggacttagtgatctggtggtaccgtatggaagggccatcactcaacggataaaagctaccctggggataacaggcttatctcccccaagagttcacatcgacggggaggtttggcacctcgatgtcggctcgtcgcatcctggggctgaagtcggtcccaagggttgggctgttcgcccattaaagcggcacgcgagctgggttcagaacgtcgtgagacagttcggtccctatccgtcgtgggcgtaggaaatttgagaggagctgtccttagtacgagaggaccgggatggacgcaccgctggtgtaccagttgttccgccaggagcatcgctgggtagctatgtgcggaagggataagcgctgaaagcatctaagtgcgaagcccccctcaagatgagatttcctttgcgtaagcagtaagacacctcagagacgatgaggtagataggctgggagtggaagtcctgtgaaggatggagcggaccagtactaatcagtcgaggacttgaccaaagcgaagcaaactggaaggttttttgcgagaaggattatgtttagttttgagtgtaaaagctcaaaagagtacggtggcgaaagcaagaaggatacacctgttcccatgccgaacacagaagttaagcttcttaacgccgaaagtagttggtgggcaactgcctgcgaggaaaggaagctgccgtgctcttttttaatattccggcttagctcagttggtagagcgcttgactgttaatcaagatgtcgtcagttcgagtctgacagccggagtaaaggggagaaggaagcggaaggcttccttttttgttattttatgaaaatgaaattatccaaccagcatatattttaataggaagccaaatttgtgaaaaacgactcaaatcatgaaaacaggctttctttttttattagactaatttctgtctttgcttgggagacaaggcatttggactgcttgaaacaaattggcactttatgaaattattttcaaaaaacacttttttaaagtctatatttatcgtataataaaagcggattcattttttgatctagaggaggaaattacatggtaggaattgttttagccagccatggtggctttgccgatggtattgcacaatctgcacaaatgcttttcggtgaacaagataattttgcacatgttatcttaaagcctgatgaaggtccagatgacattcgtggcaaaatggaaaaagcaattgcttcatttgataaccaagatgaagttttgttcttggttgacttatggggtggtactccatttaaccaagcaaatggacttgctgaaaagcatgataaatgggcaattgttgctggtatgaatttaccaatggttgtacaagcattgactgagagaatgatggatgctaatgcaactgcaaagcacatcgccactgcagttgttcaacctggtagagatggaattaagactaagccagctgacttaatgcctaagacggctgctgcagctccagtagctgacaaagctgctgctaagggcagtaagaagagcattccagaaggtactgttattggtgatggtcatatcaagtacgttttggcaagaattgattcacgtttgcttcacggtcaagtggcaactggttggattccagctatgaagcctgatagagtaattgttgtttcagatagtgtagctaaggatgatttacgtaagagtatgattcgtgaagctgcaccagcaggtgttaaggctcatactgttccactcaagaagatgcaagaaattgctaaagatccaagatttggaaacactcatgcacttcttttgtttgaaaatccagaagatgtattgagggctatcaaaggcggtattgatcttaagaatatcaacgttggttcaatgtcatataaggaaggcgatgttaacgccaacaacgtattatcaatgaatcaaaaagacgttgatacattccgtgaacttgaaaagatgggcgttaagtttgatgtaagaaaagttccttcagatgctccaggtaatatggatgctatcttgaagaaggctcaaactttacttgacgaaaaaaagtaataaataattaggagtaaataaatgaacgctattcaaatgattttggttgtgtttgttgcctttcttgccggtatggaaggtatcttggatgaatggcaattccaccaaccattagttgcttgtactttgatcggtttagtaaccggtcacttggatttaggtgttgccttaggtggttcattacaaatgatcgctttaggttgggctaacattggtgccgctgttgcaccagatgctgccttagcatcagtagcttcagctattatcttgatcgaaggtggtcaaggtattaagggtattggtactgctactggtatcgctatcccattagctgttgctggtttgttcttaactatgatcgtacgtactatttcaactgctatcgttcacatcatggacgcagaagctaagaagggtaactggcgtatgatcaacttatggcaatggattgccgtatgtttacaaggtttgagaattgctatcccagctgcacttcttttagcaatcccttcaggtactgttagaagttggcttgcaatgatgccacaatggttaaacgaaggtatgactatcggtggtgcgatggttgtagccgtaggttacgctatggttattaacatgatggcaagtaaggaagtatggccattcttcgcaattggttttgcccttgctgctatcaaagacttaactttgatcgcccttggtgctattggcctttcaatggctttgatgtacttagctcttgaagctaagggtggcaacggtggaaacaataattctggcgatgccggcactggcgatccactcggcgatatcattgatgactattaaaatgaacgcatagaggaggatttatataatggctgataagaaaactaaattaaccaagcgcgaccgttttaacgttatgtggcactcacaattccttcagggttcatggaactatgaaagaatgcaaaacggtggttacgcttattcaatgattccagcattgagaaagttatacccaaacaagaaagatttatctgctgccttacaaagacacttagtattttttaacactcacccatacttagcatcacctgttcttggtgttaccttggctttggaagaagataaggctaacggtgcagaagttactgatgacgctatccaaggtgttaaggttggtatgatgggacctttggccggtgttggtgaccctgtattctggtacactgttcgtccaattgttggtgcattaggtgcatcaatggccattgcaggtaacgtaatgggtcctatcttgttcttcgttatctggaatattatcagaatcgcattcttatggtacacacaagaatttggttacaaggctggttcagctatcaccagtgatatgtcaggtggtatgcttcaaaaggttacccgtggtgcttcaatgatgggtatgttcgtcttgggtgccttaattgaacgttgggtaaacatcaagttcactccaattgtttctcaaactcctattcaaaagggtggttacatcgaatgggacaagcttccatcaggtgctaaaggtatccaatccgctcttcaacaatgggatatgggtaacggtaaagctttaagcagtactaaagttactactttacaagacaacttgaaccaattaattcctggtttagctggtttgctcttaactttcttctgtatgtggttattgaagaagaaagtttcaccaatctggattatcatcggtatcttcgttgtcggtgttctcttccacgtatggggcattctttaataaatggctaagtcaattaatacaaaagtcgatctcactgttgatgcaacctggtttagaggaattgcatcatacggcaaaatcatgatcggcgatagagcttttgaattttataacgaacgaaacgttgaagattatgttcagattccttggaatgaagtaacttatgtggttgcagatgtccgctttggtggacgttatattccgcgttttgaaatcagaactaagtcaaatggtaaatttgtttttgcggcacgtgattccaaaaaggtattgcgagcaataagaaaatatgtaccagctgatcatatgcgcagggcattaagcttatggcaacgattgaagcaacgttttagtcgtaaaaagaaataaagtaaaaaataacctagatcaattcgatctaggttatttttgttaatcgtcatcaattgatgctcgtaaacgatttaggaataaatcagctacaggtgatttattggtttctcgcttccaaattactgttaccggctgttttaacattggagtaattggtctaaaagttagattggattcatctgatatattggctagcttatcgagtgtgagcataatagctgctttatttttaactaaaagtgtaccgttgaaattcaagttaacagtaccgatgatattaatttgctctttataattaccgaaccatgaatcaaagtactttcgattttcggcttgttgtgaatttaagacgtttcgtccaactaaatcttcagctgtaatagcactcttttttgctagaggatcatccttagtcattaaaacgccccatgtatccttctcagggagctgcagagaagcataattatctaaaggtagattaccaatgattacggcaaaatcaactgcacctgtatctaaacgcctttctgcaaattcataatcgccacttagaatatgaattttaactgtaggataatcccgaataatgttgctgacgatattcattagacgttgcatggcaaaactttcgccggcagcaatagttaggtcaccactgatgacagcactagattgtaggttactcttggttttggaagctaaagtaagaatttcttttgcttgttcatataaatactgtcctgcaggagttaaggttaagtgccgcggctggcggttgaataacttaacgcctaattcatcctctaaatctgctatctgacgcgataaagcaggttgtgagactaatagtttttgtgcagctcgcgtcatatttaattcttgcgctgtagcgacaaaataatttaaaacacgtaattccatttaaatcacctataaacaattgttattatacttcataccttataagctttgcacattgataagcttaccctttaaactgaagtagagcaagaaaaaggagtggtaataatggaaacagaagatcacgatttacgtcgaaaactagcccaacagaatcagcgattattgcagaatttaaatacacaacggcattgtagctgtgaagttagacaattgattagtgaaataattggtcaaaaaatagctgctagtatagagattcggttaccattttattctgattatgggcacaacatcaaattaggcgagcgcgtgtttattaatgccaatgtgatgatggtcgacttaggcgggattacaattgagaacgatgtgttgattgggcctggagcctacctgatttcagttaatcacaagctggatccacagcatagaaaagaactggaattaaagccagttgttatcaaacaaaacgcctggattggcgctaaagcaacgatattgcctggcgttacggtaggtaaaaacgccgttgtagcggctaatgccgttgtaaccaaagatgtgccagctaatacggtagttgccggaaatcctgctaaaataattaaaaaaattgcaaaataaaaggtcgagctaaaaaactcgactttttgctttaaacagctttttcattactccaaattttgaaaatgatgtataaaacaataaagattgcaattgcagcgaccattggtactcggtagcttggtaaaatcaatagcaggataatcattaaaacgaagaatgacaagattacataatcgatataagggtaacctggcatttgaaaatcgtttagctgattagctgctgtttttctcctgtaagccatgtgagttaaaatcatcaaactccagatgattaaaaacatactagttgaagttgatgagataaaattaaaggcctgatcgccaataaccaaggtgattagtggtgcacatcccatcaataatgcggataaagtcaatgcattttgtggaagctgccttcttgataaatgtccaaaagttttattccattttcctttaccgtcaaaagtaacagagaaaagtaatcgaccagcactatacaaaaaactgttagttgatgagacggcggctgaaataactacaaaattaataatagaactagcatttttaataccagtagcacctaaggcctcaacaaatggactagcgttagtagcaactttggaccatggaattactaacaaaattcctaaaatagccatgacatagaacaaaataattcgaattggtaattgattgattgctcgcttcaacgttgtctctggcttttgtgcttcagccgcggttaaaccaattaattcaactccaataaagctgaagattaccatttgaaatccttgtaagaatcctttactgccacgggcgaagaagccgccatgatcgtcaaggttagcaaagctaacaggaccaaagctggttttgccaccagttactagtaagtaaaggatcaagatgacgaaggcaataatcgtgacaattttgataatggcaaaactgaattccaagttgccaaagacacgagctgaaattaaattgattaacagcaagatcacaatggtaataattcctggaatccaaggtttcagtgttggaaaccaatacttgaagtaaattcctagggccgtggtttcggccatacccaaggtaatccaacttaaccaatacaaatagcctgtgataaagccaatatttttacccaaatattgttcaataaaatcaatatatgtgtgcttgttcaagtcggacataattagttctcccagtgcccgcattagcaggaagaggaagataccgacaataatatatatcaggataacgctaggaccggcgcggtgaatactgtctccaacccccagaaaaaggccggtcccaattgttccacctaaagcaattaactgaatgtgtgcattgcttagggttcgtttataaccagaagcggtctgtgtttttttctcactcatataagccccccaatgttctcaatcttttcacatatacttaatattttatcattatcaattagtatgaccagactctatagttagatttaaaaaaatatcaaaaatctgttttttaaaaataagtttgttaattcacaaacaaataattaaggaatagctttcatttgcattagagcgaaattatgaggaaatgtgaatctttgttaattcactattttcataaattcatgcatttacaaataaagttattgtgctatagttgacattgtaaattagttcacaagaattagtagatcttagaggtaataatacaatggctaagacacaacaaaaagagactcttacagaggacgaaaagaaaaagcaaatctacgacatggtcgataacttagtaaagaaatcacatgtcgctttagatcaaatggctaacttcacacaagaacaagttgataagatctgtgaagcagttgctactgcaggtgaacaaaatgcttacccactagctaaaatggctgttgaagaaactaaacgtggtgtagttgaagataaaactaccaagaatatgtatgcttcagaaaatatctggaacagtttgcgtcacgaaaagaccgtcggcgtatattgaagaagacaaggaattaggtttgactaagattgctgaacctaaaggtgttattgcaggtgttactccagtaactaacccaacttcaactgttattttcaaggcaatgcttgctttgaagacgagaaataccattatctttggtttccacccacaggctcaaaaatgttgtgtagaaactggtaaaatcattcgtgcggctgctgttgctgcaggtgctcctgcggatgccgttcaatggattgaagaaccaagccttgatgcaacgaccgatttgatgactaacccaggtgttcaaactattttggcaactggtggtccaggtatggttaaagctgcttattcatcaggcaagccagctattggtgttggtcctggtaatggtccttcttacattgaaaagactgctaatattgaccgtgcagtttatgacattgttttatcaaagaactttgataacggtatggtttgtgcttctgaaaattcagttgtcgttgatactgaaatttatgacaaagttaaagaagaatttaagaagtggaactgctacttcttaaacaaaggagaaattaagaagtttgaggaacactttattgatcctcgtcgtggtacggttgctggtccagtagctggtaagtcagcttatgaaattgccaagctttgtggtgtggatgtgccaaagacaactaaagtaattatcgctgaatataaaggcgtaggtagaaacttcccactatcagctgaaaagctttcaccagtcttcactttgtaccgtgctaagaaccatgacgatgcatttaagatttgtaccgatttattgaactatggtggtcgaggtcacaccgctggtcttcactcaaatgacaagaagattattgatgaatttgccatgaagatggatgcttgccgtatcttagtcaactcaccagctgcactcggtggtatcggtgacctttacaacaatatgttgccatcacttaccttgggtactggttcatatggtgccaataccttctcacacaacattggtgctaaggacttgttaaacatcaaaacagtggctagacgccgtgataacatgcaatgggtaaaggtaccatcaaagacttacttcgaacataacgctgctaactaccttcgtcacatgccaaacgttaaccgtttcttcatcgtaactgatgaaggtgtagctgaccaaggctttgctgatgaagttactgatatcatttctaagcgtttaggtcaaaaagaatatgaagtctttaaggctgtaactcttgatcctaatactgatgtgatcaaggatggtgttcacagaatgaacatcttcaagccagacgttgtaattgctatcggtggtggttcagtaatggacgctgctaaagcaatgcgcttattctacgaaaacccagaaatgagttttgaagaggcttaccaaaaattcttagacattagaaaaagagtagtccgtttcccaaagattaatggtgtccaacttgtatgtattccaactacttcaggtaccggttcagaagtttccccaattgctattatttccgatgccaaaactggaattaaacataccttatgtgactatgctttaacacctgatgtttcaattgttgatgatcaatttgtgcaaacgctgcccaaacgtttaattgcttggtcaggttttgaagcattaggtcacgcaattgaaagttatgtttcaaccatggcaactgacttcactcgtggttggtcacttgaagctattaaagcaattttcgctaacttgaagaagtcttacgatggcgatcttgatgctagaaagagaatgcatgatgcagctacgattgctggaatggcttattcaaatgccttccttggcttggaacactcaattgctcataccgtaggttcaacttttgatattccaagtggcgtcagtgacgcaattgctttgccacaagtcattcgctttaatgctaagcgtccagaaaaacttgctatgtggccacattactcagtttaccgtgctgaaagcgactatgctgaaattgctagagcaatcggcttaactggttcaagtgatgctgaattaattgaaaaattagttcagaaaattattgatttggctgaatcagttggtattaagatggccttcaaggattatggcgttgataaggctgagtttgacaagaaggtggaccaattagctgttgaagcttatggcgaccaaaacactgttactaacccatcagctccattaattagtcaaatttctcaattgatgagagactgctatgaaggtaagggtatcaaaaacaagtaataaaagttaaaattgacttaagtaaaaatggctatcggagcaaattctggtagccattttttatgcttaaaattataataccaattttgaatatttgtacttgaccgatttttgcaaaaagactattatacctactgtaacaataaaaataagctagtccattacttcaaagcaaactagaccaaaggagaaaattatgtgtggaattgtcggagttgtaggtaagcctgcaagagatattattttaaatggattaaccaacttggaatatcgtggttacgattcagctggcatttacttaaatgatttaaatggtaacgaatacttaactaaggctgttggtcgtatttctaacttgaaggaaaagttgactccagatgaacaaggtttagttggtattggtcatactcgttgggcaacccacggtaagccaactgtagataacgctcaccctcattttgatgaaaccaagcgtttctatctagttcacaatggtgtgattgaaaactacacagaattaaaggaaaagtacttgcaaggggttaagttccactcagatactgatactgaagtagttgttcaattgatcggtaaaattgcacgtgataagaacttagacgctttttcagcatttaaggaagctttgaagttggttaagggttcatatgctttcttgcttgttgacaacacagaaccagaccacgtatttattgctaagaacaagtcaccaatgatgctgggaatcggtgatggctttaacatcattgcttcagatgctatttctgttcttgaccaaactaagacttttgttgacttgcaagatggtgatgttggtgacattaccaaggattcttacactattgaaactgttgatggcaaaaaggtagaccgtgaacctcacgttttgaacatcgaccctaacgcagcttcaaagggtacttacgaattctacatgttaaaagaaatcgatgaacaaccaggcgtaatgcgtcacatgtcacaaaactaccttgacgaaaatggtgaaccaaaggtagatcaagatattattgatgctatttctaaggctgatcgcctttatatctttgctgcaggtactagttatcatgcaggtttagttggtaaaactatttttgaacactacactggtattcctaccgaagttggttacgcttcagaagctggttaccacttcccaatgatgagcaagcacccattctttattttcttgactcaatcaggtgaaactgctgactcacgcgtggtattgaaggaagctaacaagcgtggtattccaagtttgactatgactaacgttgaaggctcaactttatcacgtgaagctaactacacaatgcttttaggtgcaggtcctgaaattgccgttgcttcaactaaggcttacactgcacaagttgccttacaagctattttagctaaggcacttggtgaaaaacttggtaatcaagatgctaaggattgggacttacaacatgatttagccatcgctgctgaaggtatccaacaaattgttgacggtaaagaaaagcttaaggaattagctgatcaatatattgtaaaatcaagaaacgcattctacattggtcgtggtattgatcacgctgttgcacttgaaggtgctttgaagttgaaggaagtttcatacattcaaactgaaggctttgctgcagctgaacttaagcacggtaccatttccttgatcgaagatggcactccagttattgccttgattaacgatccagttactgcagatcttactcgtggtaatattcaagaagttgcttcacgtggtgcttcagtaattactattgtaggcaaggaattcgcaaatagtgatgacacgatcgtgttgccagaaattaattactacatgtcagcacttttgacagtagttccaactcaacttcttgcctactacgcttcaaaggataagggtttggatgttgacaagccacgtaaccttgctaagagtgttactgttgaataattaatatgtaaataaatatcctcaagaaggcagatttgagatctgtcttctttttttgcgttcaagtataataaacttaaacgtaagcgaggatgatgggatgtttttaacacaacggcaaaagcacattcttcaaattttgttgggaaatccgagtggggtaagtatcaaacaaattgaagagagtctaaagatcagccgccggacggtttatcgcgaatttggcgatttaaagaagaacgactttaaaattgaaaatcaaaaaggaaaatattttttatctggcgattcaaagcaattacaagaaattaagcaatctgtgcaacaatctcacagtcaaaatgtaatttcggtagctaaaagagagaagataattgcagctaagttgcttttaagtacggagccatgtaaaattattcaatttgcgcttgacctgaatgtcagtgaagcaacgattcaaagtgatttgaatacggttgaaaggtcgctaaaacgatatcatattgacttgatccgcaaaaagggtgtgggactgttaattcaggcgcctgaaaaaatacggcgtcaggttttagttgatattatgctcaatcagatcaatgaatataacttttttaagtatctgcataatgaaacgacaagcaaagacatgtttttgacaatgattgataaggctttgctagtagaggttgctgattgtcttaaaaaaagcgtgtttggtaaaattaagctagacagtgaccaaaagctgattgagttaattttaacttttgcggtaacgataaaaagaactctggcgggatgcaagctagattttatccaccccagtgctgattcacttaaatatcagggttatgtttaccgttttatggccttgtttgcgcaaaagcggcaagttgaggttgaccaaaatgatgtctcatacttagctaataagttattatcatgtgattatcacaacacttacttgacttataatgagcgcgaattagcaatctcagtcaaagtaaaagaattcgttcaacacgtttctgaagaaatgcattgggattttcaaaaagatcatagttttatgactaaagtgacgaaacacgttattggtttagtacaacataaagtagctcttttaccagatacacctattgaaattctggcaggccttagtcaaaagtttcctgatttatatctagctattcaaaaatattggcatttagcgtttccagaaaattatttgacagcgtcagagttgcagttgatcttgctttattttgccaatgaatacacgagtcgcaatcagcagcgtaatttatcggccctagtaatttgtgaaaatggcattggaacgtcggcaatcttaggtgccaaactaaaaagagaattttctgaaatcaaagaagtcaaaaccagccgtgtttctgccttaaatcaaatagacttgtcaaattacaatcttattttttcaaccttgagattgaagggcttctcaagagattatttacttgttagtccattactgcttgatgatgaattaataaaaatccgcgcttacttaaaagattatgaacaaaaatatcctcaaccagttccagctaaacaggtagttgaagaaaaacatccccattcagtcgaacaacttgctaagctatcgattagtacattattttgctcggagctagtcaacggaatcaagattcaacaactggaatacaattcgcaagacttaattgcagtaattcaggaatgtttagcccattcggattcaacactaattcgtaagcaaatgcccgttgccaaaaatcttctcaaacgtgtacgaatggcaccagttggcatccctaacagccatatcgcattgctacacacacgtagtccagaaattacacgctgttcatttaccatgtttgacttagataatgaaatctcgctccaatcaatggatcatgataccattcaagtcaaaagagttcttttgatgctggcaccagacaatcttactgcacccgaacagcgggtaatgagtactatttccagcatgattatcatgtctagtcaaaacttagatttatttacaaatggcagtcaaaaagaaattaaagaagcaattgcggcactttttttacaagacctcacagatcggttactaggtaaccaatagttcaaaagcttaatagaataggtaaactcagactctggcacaaaagtgtgccagagttctattttcatttcattgtaagcgcttactgattgacttagaataaaaatgtaagttgatgagagaggaagaagaaaatggctcaagcaaaaagtaaatcttctgttaaagtgaaggttcaaaaatttggtacagctttatccggtatgatcatgccgaatatcggtgccattatcgcttggggacttaccgctgcattctttatgtatccacacggttggttccctaacaaagaaattaataacttagttcaaccaatgcttcattacctgttgccactgttaattggttatacaggtggtcgcatggtttatgaagaacgtggtgccattgctggtgcaatcggtacattaggtgtaattgttggtactgatcaaccaatgttcttaggtgccatgattatgggtccgcttagtgcatggttattgaagaaactagatcaagtattccaggacaagattaaatctggttttgaaatgatctacaataacttttcacttggtattctaggcatgatcgctgcgattttcgccttctttatcattggaccgattatggaagttggcagtcaatgggctagtgcaggagtaaatgcaattattagagttcacttactaccattagccaacatcattattgaacctgccaaagttttgttcttgaacaacgctattggtaacgggatcttagttccattaggtatccaacaagctgcacaagttggtaagtcagttttgttcttaatggaatcaaacccaggtccaggacttggaatcttgcttgcctttactttatttggcaagggtaagtcaaagagctcagctcctggtgctgccatcattgaattctttggtggggttcatgaaatttacttcccatatgtattaatgaaaccatcattgattttagccgctattggtggtggtgttactggtactttcttattcactactcttggtggtggattaaaagcagctgcttcacctggttcaattttagctatcttgcttgtttccgcaaaggatgcttatttcggtaatattgttggtgttcttggcgccgcagttgtttcattcattattgccgcaattattcttaaaaacgacaagagtactggtgatgagttagaagcaaaacaagcccaaatgcaagccatgaaggcccaatctaaaggtcaatcaatgccggaagctgaagatgcacatgaatcagttaagtcatatgccaatgttaagaaaattatctttgcttgtgacgcaggtatgggttcatctgctatgggtgcttcacttttgcgtgataaattcaagaaggctggcattaaggtttcagtaaccaataccgctgttagaaacttgaaagatgaagatggtttgttgatcatcacgcaagaagaattagctgaccgcgctttacaaaagactccacatgcaatgcacgtggcggttggcaacttcttgagtagtccgaaatatgacacaatcgtagctagcttcaaagctttaactcaagtagaagataagccaaaggctgaaaaaccagttaagaaggttggttcacttgaaggaatcgacttcagtaaagttaaagaagtggacttcatccgtcacgatcaacacttaggtaccgctactatggcaactagtttattcaatgacgcaattaagaaggctggtaagactactcctgttaaggcagtaagaatcaacgaattgactgatgatccaagtcacttagtaattgttactccagctgctaataagaacttggctgtcagatacagtgatattcaaaccctagttgttgatgatttacttaaagataaaaagcttggcgaagctattcaaaagttgaattagaaagggatgagctaaatggcattacaattagatccaaaaatgatcaaacttaatcaagacgtaccaacgcgggatcaagcaattagaatggccggtcaattattagttgatggcggctgtgtcgaaccagagtatattgattcaatgcttgcccgtaatgaagatgtgtcgacttatatgggtaatttcatcgccatccctcacggaactgacgaaggtaagaagcacattaaaaaaactggaatttcggtagtccaaattccaatgggcgttgattttagtgaccctaaggatgataccgagcaattggtaaccgttgtctttgggattgctggtttgaacaatgaacacttaaatattttgtcacagattgctattttctgtagtgatgtttccaacgttgcaaagcttgcagacgcacaaacaccagaagaaattattgatttattaaagaacgtaggagattaaacatgagagcagtacattttggcgcaggtaatattggtcgtggatttattggtgaaactttagcagataatggttttggcattgacttcgttgatgttaatgaaactattattgatgaattaaacaagcgtggtgaatatgacattgaattagccgcacctggtaagaagagaattcatgtttcaaatgttgatggaattaacaatgctaaggatccagacaaggtagttgaagcaattaaatcaaccgatatgataactaccgccattggtccaaagattttggcaatcattgctccattaattgccaaaggattaactgctagaattcaatcaggcaacactactccacttgatgtgattgcttgtgaaaacatgattggcggttcagaacacttaaaagaagaagtttataagcacttggacgatgacgttaagcctgaactagacaagtacattggcttccctaacgcagctgtagacagaattgttcctatccaacataatgacgatccattgtttgtctcagttgaggacttcaaggaatgggttattgacgaaagccaaatgaagaacaaggatatcaagttaaagggcgttgactatgcaccagaccttgaaccttacatcgaaagaaagttattctcagttaacacgggacacgcaactgttgcttatactggcaagagccttggctatgacactattggggatgctattaaggatccatttgttttaaagcaagttaagcgtgtcttgagtgaaacccgttcacttctttaccacaagtggaacaaggaattcaccgaagaaagtttggaagaataccacaacaagattttgagcagattccaaaacccatatatttcagatgatattgctcgtgttggtagaactccaatccgtaagttaggctacaatgaaagatttatccgtccaatccgtgaattgaaggacagaggtttggactacagtgcattgatggaaactgttggtagaatttatcactttgatgaacctaacgacaaggaaagcgttaagttgatgcaaatgcttaaagatgaagacttgaaggatgtcattgtagaaactactgatttgaaagatgatccagaattagttgatgaaatcgttaagtcataccatgatgctgaagcagacaagaaaaactaattaaataacctaatagaaatatcctgaaggcaaaaagcctttaggatatttttttgataagaataagttatattgcagaataaaaaatagatatttttcttttagactcaatcgtacttaaataaatagtagagataagcgtttagaaaggaatttattatgtcaattaaagaagatgcataaagagtacatgccaacttattgaaggctactgatccagaagctttggaaagaattaatcattttgcttttgacgaagtgcaaaaagacgttgatttgcccgaccggactaagatgttgtcaactttagcttatttgttggggatgcaaggcaaggaagaatatgaaataatgcttccagtcgtactagacaatggtgttaacccagttgaagctaaggaagtttatatcaagcggttgattatttaggtttgggtagagtttccccatttttcaagattactaatgatgttttaactaagcgcggcgttgaattacctcttgcgggtcaagcaactactacactagacaatcgccttgaaaagggtgaggaaactcaaatgcgcttgtttggtccacaaatgaagggttttgccaagaagggaacaatcaataagtggttagttgataattgctttggcgattactacactagaaaaggcttggatgacaatgactgtgaaatgattaccttctgttatattgcagctcaaggtggctgtgaacctcaattgatggcccatgctcaagcaaatatcaaattaggcaatgacaaggaattcttgatgaaggtcattgaacaaaacgtaccattcattggttatcctcgttcacttaatgcggttagtgtagtgaataaggctgatgaagcagttaatggcaaaaattagaatttaaataaaaaagtccctttttgttaacagttgtagctaatagaactacaataaagtcgttatcagaaaggaagcttttaattatggcagatgcaaaagaaattgaagaaactgcattaattgatagaaatatggatcaagtttttgactgggctaagggtaatgaaatgcctattcgtgacgctatttgggaccacgaaatggaagtaaatggtcgagacaccatgaagactgaggctgcagttgaatggattcttaaggccgatgatgacaaggtcaaggaatactgcgaaaagaacttgaagaagtaacttaaaatattctaccaatagaacttaataatttcgtctgcgaataaagtgactagatcgtcaaagatctggtcatttttttgattacaattgcttgacatacgttaataaatatttaataattatgcaatataaaggttgggtgacaaaaatgaagatggaacattctgcaggtgcagttatttacagagaacgtagaagcggcgagctgaaatatttgatcgtgcagagcgtcgtaaatcataattggggctttccaaaaggccatttagaaaataatgagacagctgaggaagctgctagaagagaagtttttgaagaagttggtttaaagccgaattttgactttacttttagagaaaaaacagaatatcagttgactgttgataaagctaagacagtagtttattttgttgctagctatgttgcaggacaagaggttaacattcaaaaagaagaaattttagctagtaaatgggtcaatttggcagaagcacaaaagtatttaactgaacatgagaagatggatattttaactaaggcgcaaaattacattgagcaataaaaaagacgcataaaagacctattaaatcagggtttgtaaacacctagatttaataggcttttttattcttgctaaaaataattttgcatatttgcaaagaaaaatcaattagataaaaatgagggtaatataataggcaaatgaattaggaaagaggtgaacgatcattttttatacggttaaagaagaaagttaagtcttttgcaatatctgttaatcctaaccactttaaattttctagcttaattgagataagcttttcatctgttttgcctaaacggtaatctaaaagatacttgaggacattagttctaatttttaagtaagagattggtttaggaattgaaactttctctattttagttaaaagctgtgatgctaatttgggatttttgataattagagcggttagggcgttgatgacagaggataaagcataataatattcttgaaaatcattaaatgtattagaatttaaatttttaagaattctgattgaaatactatatagttccttgctgtcatagagaaaaacagtgttaccaaaaacattgatgtacatctctgtccaatattcaatgttagataaaatgtagaataatttcttttgatagctcactgggaaaacattgttatcagttagatcgtaataacaattacatgcgatagctagtagaagtaaatcaaattgattatgtgaattttggtattcttttttcttgctttgtattaattgcaaaatatgacgatcatcgttggcttcatagtacatagccactttcgcaacaaatggattactatgattaattttgcagtaattagtaaactcttttaggtttatatgaatattgtctaaaagcttaataactaaattgaagcgaatatcaatcttattattctcccatctggataaagtcgatggagagataactctgttagcagcttgctctagtgaaatatgttgttgaagacgaagtgctttaaatttttgaccgtacataatgaattcctggctttgaaattaaaaaataagagaatacttactgttattattataagcatttggggaattatgggaagcattgatatcaatcccatacacagtaaattgcaagttgaaaattatgcattacttaacgagagaaaataggaggtatagtaatgtctgaaggtatgaagaaaggatctttctgatggtaaaaatatttctttggagaatattgatgccttagtgaataagtatcacttgtctctagaagagcgacaattgttagaaactaaagatgaagatgatttaaagcaattgggtttaaaaagtgtatgaatcattcttataaaaatgatgaagattggcttgttgattatgagaaatatgtgggtattaaacaatgaacacacaacaaataaattttaaatgggtagtaaaacatgttccaatacgcgtggtgctagttaaatctttctagacaataagccaaattataagctaaaattgcaatttccaaccggctttgaaagcctatcagactacgtgctcgattgttctcggcattgtaataggtcagaagcgaaaagtcgctttcaattgttctgcgaatagccatcaattgatgatcattgtgctttttagctcctgtcatatttttacgatatggtgtccaaagttcataacccatttgttttagctgttgatgcagttctttgcctaaatagccttcgtcgccaagaagatagtaattagatggatgggcattttccagcagttcaactgtctccttggcatcatgaactgatgcttttgttacgacataatcaagaatggaaccgtcatcgctaacaatggcatgaactttgaaaccatagaagtaaattttcttggtggccttataaccaatgttggcataaccgcgaaaaattttagcacgatagttgcgaattggttggcaaacaggtaccggaaagctgtcaatgatcaagaaatgtccattcaggtcaacctttttattcatttcttgccgtatctgataaatcaattgcaatagctgacgtgaacgccgattaaaacgtgagtgtgataaacaattgaaacattcacagaatcttctttgtgattcaattcctgtcttagcttgccagataagtaaagccaaaatcagactgtccgtagttttaatttgatcaatatttcgctgatgagtaaactcagccggtgcatacaaacgataccagtgccgacaaattatcactaaatctttaaaactaacttgtaaatggtggctaaaacgcttaagcttaaggcagttcaatcagatcagactcttttctattattactatttacaagtcgagtctaacaagattggacttttttattaactaaaacgatttaactagcaccatgcgtgttccaatatatttacaaatagtttttctggttttatcggccatttcagcatttgaaggggtattaaatgctgtactgtttggacaattaactaatatcaattttagtaacattgaccacgtttataaatttattggcttagcctttggcgcatatctgatagtctacatagccatgctcttgttttatttggttcaaaatagaattgtgatgctattaaatattgctttaaagcaagaatatttttattctaaatttgctaattcagacatgaagcaagcaagaggagcagatgtaatcaattcgattagtggtactgctaaagaaattgaacaaaaatatttctttgggataactgacatagttcagtttgtatttaatgtggttgcatcggcaatagttgttgtagaaactaatctgattttgggaattatttatttgcttctttcagcgctaaccctgattccaagctatattggcaagaagaggatgaatgagaaaaccgaaaaatggaataaatctaactcacagttgattcaggcaatgaaggatatatttgaaggacgcttagaaatactgaattttggtgtcagacatcttttctttaaacgatttgatcgaatcttggttaatgaggaagacaaatatcgtaagatgaataattgtcaattccaggtacaattcattgcatggttaatctctttagttacactattgctaccaatttttattggcttgctttttatgcagagaggctggtttaacgtaacggtagcggccattataactttaagtttgtcagctgatagggttgtgggatatctaagaacaattgctttgtatcagactcaaattcatagcaccgatgcaattagaaaaataaaaagctataattttgaagaaagtgaaagtgttaaacaagataatcatgactctcaagctattttgaaaataaaagatttgtctttttcatatggtgataagaaaattttagatggtataaatttaactttgcgtgatcatgacaagatcattgttactggggcttcaggcattgggaaaagtacattaattaattgtattgctaataatctgaagtataacggtgaaatcacctttgctggtcatcaaattaatcctgccgatttcatcaagatctcgcaaagaatctggttattccaaggtacagtgagggagaatctatcacttctgcaaaacatacctgatgatctaatgcttcatgaagcaaaaaagatgggactgattcatgagtttggcaatgattttttagataaattaatttcagatgacgcgaacaatttatcaggtggtcaggcacaacgacttgctttagttagaggtctaattcgttctaagaagatatatttgcttgatgagatttgttcaagtttagaccctaaaaatagtgatgccattcataagataatctaccaattgccggctattgtcattgaaatagcacataactataatccacaacttgcacaagagaataaagtgcaagtttataaactgatagatgccaaactacagaagcaaaattacattgagcaataaaaaagacgggagctgaatttcaactctcgtcttttcgtcattaagaaattaaattttaattgaatgagacactaattcatttccttaatattagctcaattccttgatgatagcttccaaggtcttcttagcttcatcttgaattggagtttctgggtgttcttcatcgtacttgttgagccagttcaaacgatcttgcattctatccttcaaggtcttttggtattctgggtcttcaaggtgaacttcgtagccttcaataggtaagtatgatacacccttgaagttaccaaatggcttgaagtcactgtctttgatattgccgttagctaagtcttcaattaacttcttagtaacttccttaggaatgtctttacccataaatgcgtcggtgttcaagctgtagcaactagcaccacgcttagtgaacaattccttgaagtctctgtagtcacctgaaactgggtaagctctgaatgggtctgcgaatggttcaataaccaaagtattcatgtcaaagcccttaggtaagttttcagctgaagtacgcttggttgctaaagtacaacccatagtagttgccaatactgggtcatcgatcttgatgattggaggtaatgaaccgtccttcataatccagaacaatgcagtaattggtgacttttcaaagtctacacggtgaggactagtgtagcgggtcttgataacacgaccgttgttgttacgtaagtcttcagttacgatgactttcttgccgtctttgtctaaagttacatcacagttcataatagtggtgtagtatttagtctcgtggtggccagctgggtagtcgtgagtcttgtcaaagtatgaaggctctaaggctactgaagaaccgtcttcacgtgaaataatgaaggcatcatcgtgtaaaacagtgatgtcatatttaccatcgtacatttcgtgagtcaaagttgacttacctgaacctgataagccgtagaatgcaaaggtcttgtcgtctttatcgtcaaagtggaatgacttttcaccaccgtgacaagcagtgtagccgtgacggtgagcgatagcccaagctaaggttaaggtacccttcttcaattcaccgaagtagcgaaggttaaatacagcggcacagttatgtggagcgtcaaacacgcctaagcccttagggtaatcttcgtcttgaacatttggatcgaagtagaagtaaatgtctggttcatcgtagaactttgacttttcgtataatttttcagcttcatcgtcgaagaagtggaagttgaggatgtatgaaagaaggttgaaggcttgatcttctggcatcataatgtgagccttaacagtgaatgatgggtcaagacctactaaaacagtagcctttaagtacttttgttcatgccccttgtaaatatcttcacgtaggttgccgtccaatgcttcagcatcttcattaggattgtcaacaaagtgacgggcgctagcagttctacctaaaatcttgccgtggttgtaaaccaattgggttgcgccatgtggcaaacctaattccttagtgtgtaagattggcaagtcagtaacaataacgcctgattgcttcttagctaagttataagcttctgcaacactggttacttcgtggacattgttgccgtaaaatgcactttcaatagtggcacgagtgcggctaaacattggattatcttttcttaattcatcttgagaataacgttcttttgtactcatattaagtttttgtcctctctaggaagcttttataaaaacgctttcaataacttacataaactatagtaacataattgtttgttaataaccacacaaatataaaaatataaaatttatgaaacttaaaaatgtacatgaggagctgacatgcgtgactttggtaaaaaataaatcgatgatataatgaacgtacgtgcgaaaaaaaggagacaaaatggattcaaatcaactcttcaaatatgtctatgccaaatatggtttgaaatttaagcctgctgtaccaggttccactagcgtttacgttttaatgtcaccagttgatagtggttattttgcgatattatcacgtgggcaaggtcagagtatattggacctgaaatgtggtgcaatggctgcactaataagagatttgcctggcttcactgatccaatgaagatcaaggcggcagattgggttggggcaatattagaaaaagttagtgaagattcactcaaaaaagcacttgattttgcttttaaactggcgatgaatggtgatgaagtaaatatcgcccagaatcaatatttttatattgcaccagataaagtagatgaccgctatcaagcccaagcaattaaaccaagtgaaaatcttcgcaagaagcataacaatagtctggttccagatagaattagaaagatgctagaagtttatgactacagtattttgcccagtcgtggccgagctaagaatttttatcaacaggctaggatgatggccgactatgatgatgattatcctgaattttttgcctttaagcgtttttatccaacttatcatgatatgaatactgggcagcttagaagttactttacttggcgcagcaagattcgccagcatgtttttgaaaaaacgagtacatcctatgcctttgtttatatttatgaattactgaacaatattggtgttgatgacgcacaagatggatatgaaaagctgttagaatttgaagaaaaatatgtgcgacaatttgacattagtattgatgtatatttacaagactggctcaaagattatgttctttattatgatttagacgaaaagattattaagcagcgctttgcatctgagattaagcgtgatcatgattatgaggttttacaccatccagaaaaatttactgcgcaagagttagcagcagtctttgcaaagaaaacgacttattggaattcatctaaagttattaataagaatacgcgtggtgctagttaaatcgttctagacaataagccaaattataagctaaaattgcaatttccaaccggctttgaaagcctatcagactacgtgctcgattgttctcggcattgtaataggtcagaagcgaaaagtcgctttcaattgttctgcgaatagccatcaattgatgatcattgtgctttttagctcctgtcatatttttacgatatggtgtccaaagttcgtaacccatttgttttagctgttgatgcagttctttgcctaaatagccttcgtcgccaagaagatagtaattagatggatgggtattttctatcagttcaactgtctccctggcatcatgaactgatgcctttgttacgacataatcaagaatgtaaccgtcatcgctaacaatggcatgaactttgaaaccatagaagtaaattttcttggtggccttataaccaatgttggcataaccgcgaaaaattttagcacgatagtttcgaattggttggcaaacaggtaccggaaagctgtcaatgatcaagaactgtccattcaggtcaacctttttattcatttcttgccgtatctgataaatcaattgcaatagctgacgtgaacgccgattaaaacgtgagtgtgataaacaattgaaacattcacagaatcttctttgtgattcaattcctgtcttagcttgccagataagtaaagccaaaatcagactgtccgtagttttaatttgatcaatatttcgccgatgagtaaactcagccggtgcatacaaacgataccagtgccgacaaattatcactaaatctttaaaactaacttgtaaatggtggctaaaacgcttaagcttaaggcagttcaatcagatcagactcttttctattattactatttacaagtcgagtctaacaagattggacttttttattaactaaaacgatttaactagcaccacgcgtataagaatgaaaagttatttgttcaactgttgcgttacgtgtggctggagctgctggatgctaaaaaatacggcattgcgtattacagtgcgtttgtgggcaagcctgatataattgaaaagccaatctttgtaggcagtgttttttatctgcgacaacaacaagtagctgaccatcagattgatgcagtaagaaagtatcatttttaccaaggaaaatggcaaattcattgtgatcaacaaatcagccgtcagcgggttaatttaaataattttctccatgaattagatagagtggcgcgaacagaatttaaactaggtcggtcgattaagccgcgatttattgatcaagctgtacttaaggcaattgacgcggggattgctgaatatcacattcaagaaaaaaaggcgcagattgatcagattaagattgatttctccgatttggatcaaattcgggccaatgcttcgaagacgcgtgatagtttgttaacggatgaggaaaagcagctagagcaggcagaagcgcaagaagaagtagaaaaacaagcagatgaaactgtcaaagttgataatgaatatggcttagatgaaaatgaaatgtttttcttaactgcattgctgatgcagcagccttggcagacctatttgaagcagcaccatttaatggcatcaattttgatggataatattaatgaaaaattatttgatgaattcggtgatgtggttttagaaaataacgaacaggaccaaccacaagtaattaccgattatgtagatgacttaaaagatatgtttttgaagggatgaaatcatgccacaaaaaagaagagtaccaaaaagaattgcgcaaactgtccttaattcattaaagggtggggtagtgccaagaatagggttaccttatattaccgtggggagaaaggccgagattgaggccctattacacgatgtggatgttattcaagaaggcggagcaagctttcgttttatcgtgggtcgttatggctcaggaaaaagctttttacttcaaacgatccgtaactatgtgatggataaaaattttgttgttgtagatggtgatttatcacctgaacgtcggctgcaaggatcaaaaggacagggtttagcaacataccgtgaattaattcagaacttatcaactaagactaggcctgaaggcggtgccttgactttgattctagatcgctggattaattcagtgcagatgcaagtttcgcaagaaacaggcttaaataatgatgatcctaaatttgagcaagcagttgaccagaaaatctatggcgtcatttcttcattaaacgaattagttcatggatttgattttgctaaattgctgaacatgtactatcacgcttatatgagtggtgatgatgagactaaggctaaagtagtcaagtggttcagaggagaatatagccataagactgaggctaaaaaggaattaggcgttgatatcattattagtgatagtgattggtatgaatatttaaagttatttgcgactttctttagacaagcgggctatgctggtttaatgattatgattgatgaattggttaatatctataaaattccgaatgcaattagccgccagtacaactatgaaaagattttgaccatgtacaacgataccttgcagggcaaagcaaggtacttaggcattattatgtgtggtacgccacaagcagttaaagaccgtcgtcgcggagtttattcatacgaagctttacgcagccgacttgcttcaggcaaattcgctcaagaaggagcacgtgatatgtatgcgccagtaattaagcttgaaccattaaccgctgaagaaatgttggttttgactgaaaaactagctgacatgcatgccaatttgtacggttatgagcgcacgattactgatgatgatttggctcaatttattaagattgaatatgcccgtgttggagcggataccaatatcacgccacgtgaaattattcgtgactttattgagctgctcgacattgtttggcagaatcctgatagaaagatcactgatctgcttaactcggatcaattcagctataccaagtcagaggctgtttcggataatgcggaaaaggattataccgaatttaagatttaaggaaatggactatggacgttttttcacattatgcgccatttattcaagattatatctatgaacatggctggaaaagtttaagaccaattcaggttgcggcggccgaagaaatttttaacaccgatcataatgtgctattgtcggcttcgactgcgtcaggcaaaactgaagcagcctttttcccgatcttgtcggaaatttataatgagccagaagattcagtaaaagttctgtatattgcgccacttaaggctttgatcaacgaccaatacgatcgtctgatagacttatgcacagatgtggatattccagtttggcgctggcatggggatgtagctcaaacacaaaagcgcaagttactcaagcatccttcaggtattttgcagattacgccggaatcgcttgaaagctttatgatcaataagcacatggatattccgcatctttttggtggtctaaaatatattgtggttgatgaacttcattcatttcttagaagtgatcgtggtggacaaacattttgtttaattgagcgtttatcaaaactagctaatgtaaatccacggagaataggcctttcggctactattggtaatttagaagatgccagcaagtttttgggtgctggttcaaacagaaaaactgttacaccaagggtacaaaatgaaccacagatttggcatttatctatggaacatttttataaaacaaatccacaagcaagttccagggactttgatccgagccaaatcgaaccgaaaactgataaggcaccagaattagctgacccaggaattggctatatttttgagcatactcgtggtaaaaagtgtcttgtttttaccaatagtcgtgaagaatgtgaagctgtttgtcaggagctcagagcatattgtgcctataatcatgagccagaccgcttcattattcaccatggtaatttgtctcaagccttgcgtgaaactgcagaagccgcaatgaaagatgacgatgtctacatgacgacttgtgcaacagctacgctggaacttggaattgatattggcaaactagaatctgcttttcagattgacgcgccatttactgtgtctggctttttacaaagaatgggccggacagggcgccgcggtaatccatcagagatgcactttgtcatgcgcgaagaacaccctgaatcaagagcgatgttgccagaactgattccgtggccgctacttcaagggattgccttggtacaactgtatgcggaagaaaaatgggtggagccacctgaacctaaccgtttgccatatagtttgctctatcatcagacgatgagtacgctggcttcaagcggtgaaatgacgccagctgaacttgcttcacgggtgttaactttgtcatatttccacaacgtgagccaagacgattatcgcgttttgctcaaacacttgcttaaaacaggtcacattgagtggactgaagatggtggtctgatcgttggtcttgctggtgaacgagttgtgaataactttaaattttacgcagttttccaagaaaacgaggaattcagtgttcacgctggcagcgaagaattaggtacgatcgttaagccacctcctgtaggagacaagattgcgattgctggacgtgtatgggttgtcgaagacgtggatatcaagcgtcatcaagtatattgccatgaagtaaagggtagaattcctgcctactttggagatgtacctggagatattcaacctaaaattttacagagaatgaaaaaggtacttgcagaaaagatgatgtatccatatttgatgcaaaatggtaaagctcgcttgacgcaagctagagacaccgccgctttagctggtctgccaaagaataatttgatcaagctgggcggtaatatgtggtgtctttttccatggactgggacttatgcatttttggcactagagcgattaattcgaattaagtgcggtaaaaagttaaatatccgtggctttaattcatctagaccatacttcatgtattttgccatggatgctgatgagcatgacttctggcgcattttaggcgaagaagctgataaagactttgatccgcttgatctggtttatccaaacgaagtgccaggaatcgacaagtacgatcaatatttgccaaaggaactacttagaaaagaatttgcctacagtattcttgatattaaagaaatgaaacgctgcgttaagcaaatggtcgaagacaatttggtataattgttaataaaaaagaaaagagtaggtaaaaatggctttaaaaattaaccaatcagtttcaaaagatgcacaagcaagaactttattaaaagaacttttaaaggttcaccaaatccaccaagcatacaatgtgcgtgaattaaccgatgcagatgaacaaattttggaaaaggcatttaataccacacgtgaaatgatgcctagaatttctgctaaggaaatcaagtttgaagacaagaagtgggattcattgttcaacttcttgatggctgaacaaatttcatttgcacgtgtgcttactaatggtgatgacaacttgaacgaatatgttcaagctaagaaccaagctcaacaagcatatgcattggttgaaactgcaatcaacaatcttgaaaacgaaaacaaataattaaaagcaaatatatgcaaaggtgcatagaagccatacgtctatgcacctttattttttatagaaaattaatgacaagaagaaaaatgagtgtataatgagaattaaattttatcaaaccaatattttttaattaagcatatatgctgcaacatcaatgaaatagtgtatataccaatttaaaatattaggactaactattttactttgaggagaaaaaaagatgattaatcaaacgaacactctatttgtttttgtcgctagtgttttagttttctttatgacacctggacttgcttttttctatggtggcatggtttcaaagaagaatgctgtgaatacgatgatttcagtattcatgattacaggtgtcgcaatcgttttgtttattgcttttggttataacttggctttgggtaaggatgttggtggaatatttggtttgagtaaaagtgtctttttaaacggctttgatttaaagacgctttattccaaggattcaggcatcacaattttgacctatttaatgtttcagatgatgttctcgattattacgccggcgttgtttgttggtgcggtggtcggaagaatgaaatttaaatttttacttgcatttgtcgcaatttggtcgatcttgatttattacccaatggttcatatggtttggacaccagatggaattctagccaaaacggggatgcttgattttgcaggtgggactgtagttcatattaccgccggtattaccgccttgtttttatcaatttttgttggtccaagaattgattttgatccaaatggtgaggttaagcattataacttaccatgggttttaatgggaaccagtatattatggatcggttggtatggcttcaacgttggttctgccttaactgtaagcgatgtagctacacaagcgtttttaactacaactgttgcaactggtacgtcatttgtggtttggatgtttttggatatgtttattaaagaaaagactactatgattggcctctgtacgggtgccttgtgtggattagtcggtattacgccagcagctggctatgttactgtggcaggagcctttgccattggttttatttgtacactagccagttacggcttcattcatgtgattaagccaaaattgaagctagatgatccacttgatgtatttggctgtcacggcgtttcaggaattgtaggttcgattttgacaggattatttgcgactaagattgttaacccgcaaattgaaaatggcttgctttatggtggcgggttgcatttgattacagctcagattttaggaactttatttactatcatatttgtagggatcatgacgacgataatcgttttattacttaaaaggattattccaattagagtatcaaaagaagatgaattaatggggcttgatttagctgagcacggagagcaagcagattacggaattgaatttgaagaaaagtagccatattatttgttataatgaacttactgattattagtaagaaggatgaaaatgatacataacgaaacaatcgacacgcaattaaatcaccgttctattagaaaatttaaggatcaaactttgactaaagaacaactggaaactttgtattctgtctttggtcaaactccaaccagcatgtttatgcaaaatgctagcttactgcacgttaccgatcctgaagaaaagaagaaaattcaaaagttatgtaaccaaaaatatgttggtgcagaaggcgatttgtttatttttatcgttgacttgtaccgtaaccaacaaattagaaagcaacttgacaaagacgacggccgtgttcacacaactgatatctttttccaagcaatagaagatacgctgcttgcttttcaaaatgtcgctaatgcggtagaaagtatgggcttaggctatgtgccacttggtacggttaacgatcatccgttggatttgcttaagacgcttgatttgcctgagttgacttttccagtgttggggatgcaagtcggtatgccagatcaaaagccacaattaaaaccacgattaccacttaagttcacttgttttgaaggtagttataagaaagactttgatgtgaaagaccttaaagactatgatgatatagttacgacatattatgacttacgtgattctaaccgtcgcattgattcattcactaagcagattacaggtaaaaaacttgatctgcatgaaactgatcgtgatcaattgccagaagaattgcacaagcaaggattgtgcttagattggaaataatgttcttttttgaatgctagcttagaaaaaggtcgttgcgccaattagcgacatttggtataattcatgtgttgtgagtttgctgaattagctcagttggtagagcatctccctcgtaaagagaaggtcgccagttcgactctggcattcagcatcagagtattactaaaaagcattatttattttcaatattgttaataaatgatgcttttttggttgtgtgaattacgttcaataatgaaaggaaacgtagtatgcaaatatggcaatgttttttctaagaaacaacttaatgagttcatggcgcaaagttaattagtaaaacaaaaaactgtatcactccaatgacattagcctagagtgatacagtttttttacatattacgcagatttttattgaaaataaccattgcgattactagtactaaaattgaagcagaagtggcaagcgtactccaaatgttactatgagaagtaatcagactgcgaattagcgcagtaacacctaagcccaatagaaaattgatgctagtgtgaccgtgatgacgcaaggctgaaataatcattgcagtaaattcaaagaagagtaagaaaacgataatttctgacataatctcggagttgctttcttcgatcttagttgaaaataatgattggcaaagtggaattagatcgcggaataagagtatgatcagaataatcccgagtaaaccaattgagactactagtagattctgtaaaaggcaagcagatttagcggtaaatttgttgaagtttttcatggctttaatcctttcttttttaccattatagaataagcaataagattagggctagtgtgctaaatattatgcgtcaaacatgcgaaagcgctttttcttttctataataaaaatagaagaactaatgaaaggaaagaatcatgtcgcttagaacaaaatttaattacatggctactggtcgtccttataatgatgcggatcctcgccttggcaccttgagagaccttgctaccttgaagaccaataatattaataatgagaatgatcacgctaaaaaagaaatattaatcaaagaactctttggttcaacaggtgagcatcccttcgtgaaccctaattttcgttgtgaatttggacaaaatattcatgttggggataacttttatgccaactatgattgcacgattttagatggcgcgcctgtttatattggaaacaatgttttgtttggtcctaaggttggcttgtataccagcaaccatttatttgatccagccgagcgaaaagccggtggttgtgttgcacattcgatcggcattggtgacaatgtctggctaggtgcaggggttagcgtaactccagatacaattattggacgtaattcaattattggtgcaggcagtgtagttgtgaatgacatcccagataatgtaattgcagcggggaatccatgtaaggtaattagaaagattaccgcggcagatcgtactggattcgatcctaatagtggtcaatttctatagaaaaaagacagtagttgatttcaaactactgtcttttctgatcatcttaatctagcaacgccattcaacgccggtcatttttacattcttttgagctttaattaactcggcgccattgccgatatcaacgccgccatcaagcaatccttcgtcactctttaagttgagggatgcattggcgtagtcaaccactaaatttggtcccatcattgtggtgtcgtatttagaagtgtaaatattgattccttggtcgttttcaagcttgattggataatcaggatcaactttgtctacataaataatggaaaagtgactgccaattgcacaaccgccgcctttgatagaatatttaccaccaccatcgtcggcgattaaaattagaattttattcaagatttcgcgtctttttaagtagtcaagcgccttgtcagtgaatgtaattttcatttcgaacacttctttcttgtttcatcttgttaactcaattatagtcaaaaagaatagtaaataaattaatttaaatcaaaaatggaggaaaaataaatgactgataagagccatgatccagataattttgattggctggattccattattaatgaagaaactgacaaacgtgtaaaaaatgaaggtcctcaaaagaaggatcaaacaagcgatgattctgataatcattggtttgattcgatcatcgatgcagcagttgaaaaacgtactaaagaaaatgaacggattctgcacaaattgaaggaaaaagaaaatcaaaataagtaaaaaggtggaagaaacacactaggcttggagttcttccactttttatttattcagtgtagataatgatcatttcctgccattcattgctttcgccgatgttgcgaaattcaagcttgaataccctggcgtttgggtgtttttcttcccagctagaataagcatcagatggcatgtcttcagttgattgatatttgaaagaatcaacgtgtaagtccttggcatcaattgcattttcttcattaaacattgcaatcacttcttttcatatctattgtagccttttttttgccggaggttaattttaggattgcatagaaaaagaaccagtgtacatctgctataattaagaaaaaaatgttagtttaatttagcacatggggtagtatgaaatgaaaaaaattatcaatcgaacgctgttggatgatcgagtgaaggagaactatatcttcatttctgatattcatggcaacttagaaaccttagacttaatcaagcaggcaacagcagattttccagaagcacaattagttgcgggcggtgactatgttgatggccgcgagcatgtgaaggaagtattggattatttaattgagcaaaaaagcgaaggagcaatcgtactactgggtaatcatgagcaaatgttactcaattttgcggagaagcaggaacatcaagatggcatttgggtttataacggtggtggcaagagcctagttagtctgtttggcagctatgaaaaacatatgcaaacaactacattgtatttatttgtagtcattatggcttaacatgcctatgcttttcttatcaacgtcttcatcagttttccgatattccaacttgggagtaatcgcattgaccgactcttttgacttctttttcggacgtagcttcgcccgcattctttttataaggctttatttaattctggatgttttaccagaattattaagttgagcatggcgttttcgtcacggtcaacttttttattatagttacggcagttcggattataacaaacaaattcattatgcttggtgccatgcttcttattgcctcttaaagtgattttttcatcgccttttttcactaatccgcaggctgcgcacctttgagttgaagggtacagtttattggctacgatcaatttcttgccataccattcgcatttataagtcaatatctgtctaaatctgccaaacattgacctgtgcattcctttggaggcaacatgactcataagcattcctttaacgcttaggtcttcaatcacaatagaatcatattcgctaaccagctttgtggtaaatttctgcatcaaatcattttgaatatttttagcacgagcgtaagctgcttgaagcttgtttctcgctttcatgtagcgcttgctttgcattcctttgattttaccattgacgacacgctttttagacagctgtctttgataatgcttgattttgcaatagactgctgctaacgatttgggcattactatgcattgaccgtctctgtaattgaaatgtccaacattgatatccacgcctgtatatctgcctgtcttaggcttgtcttctggatcagatattttaaaaggaatggatgcatagtatctgtttttttctttgtaaaagctgattgttccgaaatcatccgacaatggagcagagcttaatttaaagccgttccatgtttctttgacagccctaggcttttctaaaaataagcagccatccttaattttggcctgatccattttaaatccctgcctaggtgcttttttagacttgaattttggctttccccagcctggctgcgctttatcaaaaaaattctgccaagcattgcctaagtcttggatcgccaaattaaagacatgagctggaagctttgtctgccagtattgcttgttttcagtcagctcatcacgaattctgcgccaggaagggacaggattgtttgcgagaatttctctttcagcgtttgtaagcttttgtttttttctaggctttttaagttctgctttaagatgctgggttaaagccaattgtctggcttcatgcatattttgccaggtttctaaaccgagattccagctgaagcgtctgtaatcacaaagcgaatcaagaaccttcttcatcctttgattgggttttaatcgatatgttctggttttgatgatcactcttttcaccttccttctttaaatcccgcctaatcttcctgccgtaccgtctcaacccataaagccgacatgaaaacacatgaattactgaaattaagtcttcaaccatttcctcatctggagaggtttcagggttgtttaaaacaataattttagtatcgtgcttagcacaaaaatgttcaaaccaatcaaagccaaagcgggcaaaacgatctttataggtaacaaagattcgttctatttttcctgcttctacttcatccaataatttattccattttttgcggttataattaagccctgatccaatatcttctacatgttcatcaataatgatgcctctagcattggcatattcaatgatgaaagccatctgatgcctaagattttctttctgacctacagaagaaacacgggcataagcaactgtcttgcggtgaggcttaatgcccctaaaagcatccagccgctcttgcgtatagtatctgcgattggcaacattgcgctgagcaactagtcttttttctcgatcccatctttgcatggtagagcgagatacaccgagaagcttagcagcttcgccaactttataaattcttgacataaaaatagacctgctttctttgcggtcaattatatcattaataggcatatttagatatattaaatacataatttactacttgtgattaacagtacagttttgcctgatgagttgcgtgatagtgagtattatcgctttctaaaaggctgtcctattatgtatgaaacgccacacttgatttttgttcatgcgggtgtgcggccagatgaacagtataatgatccggaaacttactctgagatagagtatggcttgaaatttgactatgatttttaccgtatttgggcacgagataagtattggtattccgattccttattgaaaatgatggctcataacaaaacgggcaaaacaattgtgactggtcatacgccaacagctgctttagaaggaaaatatgatgatggtcgacaaatgaggcggctatcaattgatgattgtatagttagaacagtgcaatacccaggtgagccagcaagaatttttactgacggtggttcacattctgatccattgatttatccacataatgatggaaatgttgtagtgctagatggcatgggtaaaatagtccgtgtttataactggaagcatccccacggtacaagatttgaaaaccaataaaaaaggcatcccttgcggacgccttttttcgatttagagatcaaaatttgcttaatcttcgactttcttggcttcgttcatagccttcatgattgaagggttctttgaatgacaatctttgatcatttgtaaatcttcttcgcttaactttacttcgtatttagccataattttatttcctcgctttttttatgattacatgtaaactatagcacttacagccataactgcaatattttgttaatcaaactttggttaaaaatataagcaaaaaattatcttttaaaatagtggtaataaaatcgctttcaggatattgttatattgcgaaaggtatataccaaagaaacacgagatcatttttagattgaagagggaattattatggctaatagtaaatcgagcggaggtttgaatgcgtttgttaacaaacacattatgcctgtagccgctaaaataggcagttttaaacctttaattgctgttcgtgacggtatcgccatggctataccgttaattattgtaggatcattaattcatttccagttgccggttggtctgattggctatcaaaaactgctgttcatggtataagcctggcacagattttagccaagattactaatggctcctttgggatcatggtcttaattgcagcttttggaattgcgtggagttatgctaatcaatataagacagatggtgtttctgccggaattgtttctgcagctgtattcttcattttgacgccaagtattatgagtggagataaagttccagttgaaggcttcccttacacttacttaggtagtagaggattatttgtagctattatctttggtctcctaagtgcatggattttccaatggtttattaatcataatatccaaattaaaatgccagctactgtgccacctgctgtagctaagagcttttcagctttaattccaggtgccgctgtaattgctattgctggctgtgtttactggctttttgcttggattggatggggcaatattcacgatgtaatcatgaatattttggctaagccactaggtgcattaggcgataccttaattggtacattagtttcaattattttattgagcttgttctagttcgttggtattcatgttggtaacgtagttaatactgctatgcaaccaatctggttgatgcaaaccgatgctaaccgtgtattgaatcaagcaggtaacttagatttagctcatggtggtcatatcgttacgcaaccatttatcgataactttgtttacatgggtgatggaggtgccactattgggttagtgctttgcattggatatttagtatggcgcaagcgcgcaagtaaacaaaataaagttttagcaccactgaccatcgtacctggcttgttcaatattaatgaaccaactatgtttggtctgccagttgtaatgaacttgttgttaattattccatttatgattgcgccaatgttaaatgcgattaccacttattgtgcaatgaacctaggcttagttctattatgtaatgggactgtaattccttggacaatgccgccaattatttcagtttttttggcaacaggcagtattgcgggctcaattttgcaagtaatcaatattatcttagacattttgatttacctgccatttattgcggcacttaataaacgtcaacttatagaagaggataaggcagaataatggaataaattaataaaaaatttgtgagaattaaaaaagaaagaggaaactctttcttttttcgttttgcaaaagtgtttcaatatattaaatgcgaacaagcttttgcacatagcaaataaaaattaaaaatcgagttaaatggcgatctgatgcggttttgtatcatctgaataaatttacataaatattacaattgttacaattttgacatactttgcaatagtttcttaatctgcaggtgatattcctgttatagttctgcaatttaagcaaggtagtatatgctgtgtcaattgaatgggacggacgaataaggtgaaaattcgttacttatgacttttaaaattttaaggagagaatttttttgaaaattaaatctatcttagttaagtcaattgcagtaactgctttatcagttacaggtttagtagcagctaataacaacactaatactgctcaagctgctattgtagaaaacgatacagctgttgtaacagttaagaacgtttcagacaacgcaatcactgtttacaacagctacaagaatccagaggctactggccaaactttggcaagcaacacctcatggaaagtaattaagactgcttacgatgccaaaggtcacaagtggtatgacttaggcaagaaccaatgggttcgtgctaagtatgtaactcgcggctaccacactcaagctgctgtaacccaagctccagtacaacaccaaactcaaactgaaaatactaattctgcagcaactactactgcagcaaataacaccaacactcaaactactacttcaactgtaagtggttcagaagctagtgctaaggaatggattgccggtagagaatctggtggctcatacggtgcttcaaatggtcaatacgttggtaaataccaactttcagcttcatacttgaatggtgactattcagcagctaaccaagagcgagtagctgataactatgtcaaaggtcgttatggctcatggactgctgctaaggcattctggcaagcaaacggctggtactaaaaataaacctcttttcaaaactaaataaaatcaaactaacttaaaggaggcatgctgtcaaaatgatagtgtgtctctttttgatttttttaattaaatacgcgtggtgctagttaaatcgttctagacaataagccaaattataagctaaaattgcaatttccaaccggctttgaaagcctatcagactacgtgctcgattgttctcggcattgtaataggtcagaagcgaaaagtcgctttcaattgttctgcgaatagccatcaattgatgatcattgtgctttttagctcctgtcatatttttacgatatggtgtccaaagttcgtaacccatttgttttagctgttgatgcagttctttgcctaaatagccttcgtcgccaagaagatagtaattagatggatgggtattttctatcagttcaactgtctccctggcatcatgaactgatgcctttgttacgacataatcaagaatgtaaccgtcatcgctaacaatggcatgaactttgaaaccatagaagtaaattttcttggtggccttataaccaatgttggcataaccgcgaaaaattttagcacgatagttgcgaattggttggcaaacaggtaccggaaagctgtcaatgatcaagaactgtccattcaggtcaacctttttattcatttcttgccgtatctgttaatcacaagtagtaaattatgtatttaatatatctaaatatgcctattaatgatataattgaccgcaaagaaagcaggtctatttttatgtcaagaatttataaagttggcgaagctgctaagcttctcggtgtatctcgctctaccatgcaaagatgggatcgagaaaaaagactagttgctcagcgcaatgttgccaatcgcagatactatacgcaagagcggctggatgcttttaggggcattaagcctcaccgcaagacagttgcttatgcccgtgtttcttctgtaggtcagaaagaaaatcttaggcatcagatggctttcatcattgaatatgccaatgctagaggcatcattattgatgaacatgtagaagatattggatcagggcttaattataaccgcaaaaaatggaataaattattggatgaagtagaagcaggaaaaatagaacgaatctttgttacctataaagatcgttttgcccgctttggctttgattggtttgaacatttttgtgctaagcacgatactaaaattattgttttaaacaaccctgaaacctctccagatgaggaaatggttgaagacttaatttcagtaattcatgtgttttcatgtcggctttatgggttgagacggtacggcaggaagattaggcgggatttaaagaaggaaggtgaaaagagtgatcatcaaaaccagaacatatcgattaaaacccaatcaaaggatgaagaaggttcttgattcgctttgtgattacagacgcttcagctggaatctcggtttagaaacctggcaaaatatgcatgaagccagacaattggctttaacccagcatcttaaagcagaacttaaaaagcctagaaaaaaacaaaagcttacaaacgctgaaagagaaattctcgcaaacaatcctgtcccttcctggcgcagaattcgtgatgagctgactgaaaacaagcaatactggcagacaaagcttccagctcatgtctttaatttggcgatccaagacttaggcaatgcttggcagaatttttttgataaagcgcagccaggctggggaaagccaaaattcaagtctaaaaaagcacctaggcagggatttaaaatggatcaggccaaaattaaggatggctgcttatttttagaaaagcctagggctgtcaaagaaacatggaacggctttaaattaagctctgctccattgtcggatgatttcggaacaatcagcttttacaaagaaaaaaacagatactatgcatccattccttttaaaatatctgatccagaagacaagcctaagacaggcagatatacaggcgtggatatcaatgttggacatttcaattacagagacggtcaatgcatagtaatgcccaaatcgttagcagcagtctattgcaaaatcaagcattatcaaagacagctgtctaaaaagcgtgtcgtcaatggtaaaatcaaaggaatgcaaagcaagcgctacatgaaagcgagaaacaagcttcaagcagcttacgctcgtgctaaaaatattcaaaatgatttgatgcagaaatttaccacaaagctggttagcgaatatgattctattgtgattgaagacctaagcgttaaaggaatgcttatgagtcatgttgcctccaaaggaatgcacaggtcaatgtttggcagatttagacagatattgacttataaatgcgaatggtatggcaagaaattgatcgtagccaataaactgtacccttcaactcaaaggtgcgcagcctgcggattagtgaaaaaaggcgatgaaaaaatcactttaagaggcaataagaagcatggcaccaagcataatgaatttgtttgttataatccgaactgccgtaactataataaaaaagttgaccgtgacgaaaacgccatgctcaacttaataattctggtaaaacatccagaattaaataaagccttataaaaagaatgcgggcgaagctacgtccgaaaaagaagtcaaaagagtcggtcaatgcgattactcccaagttggaatatcggaaaactgatgaagacgttgataagaaaagcataggcatgttaagccataatgactacaaataaatacaatgtagttgtttgcatatgtttttcatagctgataaatcaattgcaatagctgacgtgaacgccgattaaaacgtgagtgtgataaacaattgaaacattcacagaatcttctttgtgattcaattcctgtcttagcttgccagataagtaaagccaaaatcagactgtccgtagttttaatttgatcaatatttcgccgatgagtaaactcagccggtgcatacaaacgataccagtgccgacaaattatcactaaatctttaaaactaacttgtaaatggtggctaaaacgcttaagcttaaggcagttcaatcagatcagactcttttctattattactatttacaagtcgagtctaacaagattggacttttttattaactaaaacgatttaactagcaccacgcgtaattaaataaatacgatataatttaaataacaaatattaataatcaaaacatacagaaagtggaacagctatgaagcaaaaattaattgtgactttgttgactagtgtttgcctgatggggacggctagtgtaatacacgaaacgacaccacaaacggttcaagcagcagttaagggaaaagttcaggttaaaggaactaagaaagttagactttatacaaataagggcaagaagtctaagtattatgctgtagctaaaagagagtattcttattctgctaaaaagtatttaaagctgggcaagaaaaaatatttggcttataagattggaaataactctcaatggttattagctaaaaatgccaaactcgttaaaaagactgctgcaacgcagaattatgtaacagctacaatgaagatgccgagtggctatacgaaagctagtttattgcaagcatataaggggaagccaagtgctagttttattcaggcttgcatgaaaggaatggagcaaaacgacttttcacgtgttagctcaggtgaaagcaaagccgatcaaaaaatgatcaatcttgccgatctttctgctagtgagcaaaaagaactggcagaattctctttgtgcctaattaatagtgctcgtagtcaattaggtttgaagccgtgggtttatagttctggagtagagtccttagctaattcaattgcgcaagaatacgagcaaaatggcaagagtatcaaagatggcgatcactatgttgccggaattgtacgggcttgcaagaaacatggcttagaattaaacgataattatgtcgaagatatggctggtttttctactaataagaagattatgtctatggctgaaatgaagcgaaatatttactttggcttgaagcaaatgatctttggctttgcaggagctggggaaaatcagcgtaatgataagagcctttaccgcgaatgggaacatgccggtgatttatttaatacacagggctcacgtcatgatggggactacaattattatggctttagcatttccaagactggcaatatttactcaatgcacttcattagtgtgccaagttttgttgtaaattcgagtgaatacaacaagaacttcaaaatttaacgaaaaaatatgaaagcacgcacgacgcgtgcttttttgataagataaaggaaaaaacgatttagcgaggaaaatatgacaaaaactttatatttagtccgccatggacaaacttattttaactattaccataaagttcagggacgttgtgattcaccattgaatgaaagaggcatccgccaggttgaaatggcccgtgattattttaaaaagcagggtattcattttgacaaagctttttcatcaacccaagagcgtgcttgcgatactttggaaattattactgatcatcaaatgccttatacgcgtttaaaagacctgcgagaaaaatgttatggcatttttgaaggtcgtgatgagttcttattgccttggaattataataatcctaacgtagacccaactatggaaaaagacgaagacgttgttgctagaatgcaccgtgcggtagtcgagattttaagcggcttagaggatggtcaaactgctttagttgtaggacatggtgatattttagctaagtttgtgcgcgatgctaccgagaataagaactttggcggttttggcaatgcttcaatcgtgaagctaacagttgatggtaaaaagatccattttgatacgcgtggtgctagttaaatcgttttagttaataaaaaagtccaatcttgttagactcgacttgtaaatagtaataatagaaaagagtctgatctgattgaactgccttaagcttaagcgttttagccaccatttacaagttagttttaaagatttagtgataatttgtcggcactggtatcgtttgtatgcaccggctgagtttactcatcggcgaaatattgatcaaattaaaactacggacagtctgattttggctttacttatctggcaagctaagacaggaattgaatcacaaagaagattctgtgaatgtttcaattgtttatcacactcacgttttaatcggcgttcacgtcagctattgcaattgatttatcagatacggcaagaaatgaataaaaaggttgacctgaatggacagttcttgatcattgacagctttccggtacctgtttgccaaccaattcgaaactatcgtgctaaaatttttcgcggttatgccaacattggttataaggccaccaagaaaatttacttctatggtttcaaagttcatgccattgttagcgatgacggttacattcttgattatgtcgtaacaaaggcatcagttcatgatgccagggagacagttgaactgatagaaaatacccatccatctaattactatcttcttggcgacgaaggctatttaggcaaagaactgcatcaacagctaaaacaaatgggttacgaactttggacaccatatcgtaaaaatatgacaggagctaaaaagcacaatgatcatcaattgatggctattcgcagaacaattgaaagcgacttttcgcttctgacctattacaatgccgagaacaatcgagcacgtagtctgataggctttcaaagccggttggaaattgcaattttagcttataatttggcttattgtctagaacgatttaactagcaccacgcgtattttgattcatacgtgtggccagcagagggtttaaagtaagacgaaatggcaattaatttatatttagtcagacatggtcaaacttggtttaataaaggacaccgcatgcagggaagctgtgattcagcgctaacaccattaggcattaagcaggcggaagccgtgcgggattattttcaagatcagggaattaattttgctagagcatattgctcaccccaagaaagggcaagtgatactttagagattattgctgggcctgagatggagtatgttcgattaaaggaattaaaagagaaaagctatggcgcttttgaggcacgcaatgtgctactttggccgctgcatcgtttgggcaaatttcgcgtggaagataatcatgaggtagttgagcgaatggagcgcgggattaacttgatcatgcgggatgcacaagatggcgataatattttagttgttggtcatggcgatagtttgtcgcaatacattaatgaaaaaactaaccatcgtgaatttttaggtctgcccaattgttcttttgtgcagttaactagcaatgaaggcagtacattggaatatgtacggactgaatggccagctaaagcggttaaaattgatcaaataactggtgaataggggcttttatttttctgcattagtttataatgataggtgtggaaagattatagtacgaggcaagaaaaatggatgaaacaccaatttttagaattactaaattaaatatcaaggaaaacgatcgcggtgaatatatccgtgaagttgaaaataacatgcacaactcaattccagctgaagaaggaactttgttaattggaagcgcacatgacgatgctcatggtgaagacaattacgaaatcgaattgttccggaatagcttggcagaagatttgcacattgcagcagcacatgctgatgattttgcagaaaccatcgacaagatttccacagacaaagaagtaatcgaattaaagcccgaagttattaccacaaaggctcatgatgctttgaatgataacgcagatcattttgtaatgcgcttagttaaagttgaagttaaaccagaagatgcagaaaagtttgcgcatgaagttaagaaagaaatgacgactagcatggctgctgaaccaggcatggaaattatgatgtctggagtcaataagaagaacgaaaacgaatggtattttgtcgaagtttactttgatgacaaggcttatgatgcacatattaagtcagctcaatatcttgaatacgttgagaacaccgatggtatggtagttagaagagatgttaagaatctagttcgtgatactttggcaactcaaggtgcaatcgtcttagattaaaatagagcagatgccgcgagagcggcatttttttgtaggtgaaaaaatgactcagacaattatttttgctcaccggggcttaccggtcaaatttgcggaaaattctttgcaaggatttaaatatgcagcaacgcatggcgctgaaggtgtcgaatttgatgtgcacttaactaaagataaagtgccggtagtaatgcatgatgaaacgttagatagaactactaatgggacaggttatattaaggactataccttaagtgaaatcaggcgatttcgtttagctaacggtgaaccggtaccgatgttaagtgaattatttgaaattcttcagggacaggatttgtatgttaacttggaatttaagactaacaagattcatgatgaggggattgaagccatcgttttggcgttagcacaagaatatcattttgtgcatcccattattttctcttccttcaattatcaaaccttaaaaaattgccagcgaattgatccccaccaacaatattgctttttaaacaaatggccggtgccgtttcctgaacagtttgcggctaagaatcattttgcagcgatccatccgcattggtatttacctagcaaagttacgcaaagaatttggacagtagataaagtaagcatagcaaaaaggtactttaaacttggtgtagctggaatttttaccaacgactttgaattaatgaataaggttaagaagtcacaaaagttataatcgtaaaaaaacaaattaattttataattcataaaagaaagattcagtatccttcgagcaaatgtgaaaaaatcaaaatttttttgaatttttccttgatattttttcttcattcccctatactaatatctgttgggtgatcgagaggtcattcaaatagaaccaatcaagtaaaaggtttgaagattgggttatagccaagtggtaaggcaatggtttttggtaccatcatgcgctggttcgaatccagctaacccaatagcaaggtcaggcagtgagcctgatcttttttattcgtttcggataattcatgttataatctgtatatgaaaagaagcccacggccgcaatccgttgacttcgatcgtagtttcagataactgttggtttagctaatccttgcgattagctttttttgttatcgcataggctatagccaaattgatagctaaattgcctaaagcacctagaacgatgctgattgcaatagcccaagctaccacggagcactaaacctccaaactatccgtttatgcataactctcaccgccgtaatttcaaaatgtgtgaggggtggttagttatgctaaaactactaaacacaaatagttgcaacatatccatgtctatagaatagtatatcaaaattaaattataaaaaaacacgtgttcattgcaaacacgtgttttttatcattcttaaattcttttacaatttctaacgatttagtaaagataattgcattgtcaaataatatgcatataataaaaatgaaaattgaaaaagcaaataaactgttaggtgaggctcctacgtgaacacaagctatcgcccggaaacatccagagatgccaacgagtaaaatagttcttgtcgagataaggcgagatccagatagctagcctgtgcttacgtcacgtagtgtcaaaactgaacgacgaggaaacatcgcttagataaggagttaatactaattggtattggctcctttttagtttgtttgcgtgtttaatcagaaagtgtgattaacatggcaaaaaacaagttgctgattaataagaagacagccgatacagagtttgttaagcagatcgctaggcaaactcccgaagaagcgttaaagacgctacatagttcgctagacggtctgtcttcggcggaagctaaagagcgtttggagaagaatggtcttaacgaagttgctaccaagaagcacaacacgaaattgcatttcttcattgaatcattcttcactccttttacaatggtcctgttgctgctagcgacggtgtcgctgtttaccgactacgtcttcgtgccggcagatcaaaaggacctgagtactgtgatcattatgattgcgatgatcattatttctggattaacatcctttatccagaatgtgaaaactaatgacgcagttgaagccctcttaaatatggtgtctgtaactaccaatattcgtcgcaatcaaaaggatgaagaaatttctaccaagcaagtagttgtcggcgatattattaatatccacgctggggacatggtgccagcagatattagattgctcaaaactaaagacttgttctgttcatcaagttctttgaacggtgaatcaacgcctgtggaaaagattgcgactaagaggcccgatcaaaaagacatggatcaatatttggactatcctgatgtaatctatcaaggaacaactattgtgtcaggttcaggtgttggcgttgttttagccaccggtgaacaaactgtctttggtcgtttggctaaggatatttcaaacaacgacgttaaggaaactaatttcgatgttggtatcaagaacatttctaaattattgttaacaatgaccgcgatcattgcacctttagttttggtcatcaacggtttaactaaaggtaactggctcaacgccttgttgtttgccatcgctactgccgttggtttaactccagaaatgttgccagttattgttactagtaatttggttaagggttcgctagaaatgtcgaagcacggcaccatcgttaaaaagatgaactccatccaaaacttcggtgccgccgacgtgctttgtactgataaaaccggtactttgacccaaaacaaggttgtattggaacggcactacaacttggatatgaaggaaaatccacaggttttgcgcttggcttacttgaactcgtacttccaaacggggatgcacgatttgatggaccaagccatcatcgatgccgctagcgatgagctagatgttaatgaaattaaacacgactacactaaggttgatgaaattccattcgacttcaagcgccgtcgcatgagtgtcgtggtcaagcgccacggcgatggtcgtatcctggtaactaagggtgctgccgaagaaatgcttgcttgctgcaatcgtgtgcaagttggcagtcacatcaacgatttaactgatgattacaaagaaaaagttttaaagcacattgaagatttgaacaaagatggtttgagagttgttttgttagcttacaagaacaatcctgctcaagccggtgaattcaatgttagcgatgaaaaagatttgatcttaactggcttcttggccttccttgatccacctaaggatgatgttaaggacgtgcttaagaagttaaagcaagacgatattaccgttaagattttgactggtgataacgctgctgtaactaagagtgttgcttcaagagtaggcttgaacaccaagtacatttatagtgaaaaagattttgctggtaagagcgacgatgaagttaaaaagatggttgaagaatgtagcctctttgtaaagctttcaccagagtcaaaggctagaattattcagattttgaaggaaaatggtcacacggttgcttacatgggagacggtatcaacgatacgccagccatgaagaaggccgatgtagcaatctcagttgatacggctgttgatattgcaaaaaagagtgcggacattatcttgctgcacaagagtttacgtactttggaacatggtgtaagaattgggcgtcagatctttgcaaacacgatgaaatatatcaagattaccttgtcatctaactttggtaatattttgtcaatcttagtggcatcatcattcttgccattcttgccaatgctgccaatgcaattgttgattctagacttgatctacgggacatcttgtttgtcacttccatttgatagagttggtgaaaaatacttggaagtaccacgtaagtgggagacaaagaagttgcctaagttcatgttcttctttggtccgacatcttcaatctttgatatcattacgtttgccttgctttacttctggatttgtccaagtactgtgggcacaagttatgtggctgctactccagggcaaaaggctgtctttatggccatcttctggagtggctggttcatcgaatcactctggacacaggaaatggttatccaagcattgcgtgatccagcaattcccttcttacaacagcactcttcaggcgtagtaatgctcgctacgatcggtgcaggattgatcggtactgcaatgccttacattccaagcttggctaaggtaatgaaattcggtccgatcccagaatattatgttctcgtagttcttgtacttttgaccttgtacattgcattgaccactctggttaagcactggtacatgaaaaaagagaagttcttgatttaatgaaagactataaaaagatacttaatcagttgcttttaatatgtgggattattagttatatcttcttactgttagaagcattgccaatatttcagtttttttatatcaaatcatatccggtggattttactatcttaataactgatatagttttgacagtggctttaccgattttgtcatattttcaacgttttagaatattaacgattgttttggcgatagttttaattattcttttgctgataaagtatcaggcaatgtatccgactgttacggctatttatagtatttatgctttgttaattattggatttaatgtgcactttagatatcaaaattaatatttcctttgacaaagattaaaaagactcctatatttgaattgatttagttcgatataaggaggaaaaactatggtcgacttaacaaaacatatgaaaaaaggcttggttgaacaaaagccagggcagattttggcctttgcagcttacaccaacaagatttcggacatcgtcaaattcacgattggtgagcctgactttaacacgccagagcatattaaaaaagcggctgaagccagcattgctaataaccattcacactatgcgccatctaacgggactccaggtttgcgcaaggcggcagccgattttttagctgaaaaatatggacaaaaatacgacccaagcgaaattttgatcaccaatggggtaacggagtcgatctacgactttttgactgcggcgcttaatccaggcgacgttgttttggtgccaacaccaatttttccgctttatattggggatgccctatccatgggtgcaacggttgaacaaatcgacacttctgacgatgacttcaaattaacgccggataaattgcaagcagcattggacaagtatggtgatcgcgttaaggcgcttgtcatgaattatcctaccaatccaacaggtgtgatgtattcacaagatgaacttgatgccttagcagatgttgttcgagataagccggtttttgttctttgtgatgaaatttatagtgagctcaattatgatcagccacatgcttcgatggaaaagactttacatgatcaagttgttttaatgaatggcgtgtcaaaagcttgggcaatgactggctatagaatcggtgtggtagctgcgcctaagccgattttggatcaactggctaagattcaccaagcaatcacaacgacggaaccaacgccaatgcaggatgcagctgaagaagcactaggcaatggaatgaacgatgcggaaccaatgaagaaagaattccaaaagcggcgtgatgtgctttatgaaggattaaccaagttaggctttgaatgcgttaagcctaaaggtgccttctacatttttgccaaaattccagcaggcttggaacaagatgataccaagtttatttatgatttggctgaaaagaggcatgttgctgtaattgcgggctcattttttgctaaaggtggagcaggatatattcgtttgtcttacgcaacgtcgatggatcagatcaaagaaggcttgaaacgactagaaaaatatgtcgcagaaaataagcaataagtgcaaataaaagggaccgatgttatgtatcgatcccttttgaaatccaactaattattcctcgttatcaaatggataagtcatgccccaggcagttctaatgctggttaaaatgtgagcgatcatccgcgatttttccaattcgccttcgtcatggccttgttcaatatacttttgaaaatcagtgacttcatattcaagcgcctgatcagcatccccggcagtaaccttatcatagctttcctcatgagcactctgggtgtaagtaatatcagcttcagtgccgcgaggatattgattgatttcgaaataacctttggtgcccgaaaccagtccgcgcttaggctgcttggcccgcatcgataatgacatcactgccatttggcctttcgaattttttaaaataatgccgctttcttcgtcaacaccagtttcaaagaattttaccgtggtattgatactttcaggatattcatccatgaaactaatggcaaaagcagttgcgtagccgtcgatatccagcaatgcaccaccagcgagctccttattaaagaagcgattctgcggatcatagtccttgagtgagccaaaattaatttggatcattttaatttcgccaaattttccggtcttaatcatatcttgcatcttttggtagattggcatgtgataaagagtaaaaccttccattaagattaggtgtttctctttagctaattgagccacttcatcaaattgctgtgcattgacggtaattgccttttcgcaaaagacgtgcttgccagcattgagggcctttttgatgtagtcgtagtggaaagtgtgtggggtagcaatatagatgatatcaatgctaggatccttaatcatttcatcaggattagtgaaagcatgctgtacatgtttttcttggacaaaggcacggagtgcttcttcatttggatttgcggcaacataaatttcgccgttgactttgttcaaagcatcagccatatcatgtgcaatccagccagtaccaataattccccaattaaatgttttcatgattattacctctcttaagttcaataatttctccgtctttttcagtaattaatgaagtagttaagttttcaaatagtgaagaactaactacgccattttgtaaacaaagttgacgattaagttcagtgatattgtgccaatcttcgttaaaaacatcgattaagtagttgcccaaaggcgtacgggcaaatgcagctactgaactatcttgtcgaatcttactagttaaatgtaaactgcttaaatacttctgtacttgattaacacaaggcggtgccacttcaagacaaagtggaattttaggattcagaatcggttgtatcctttgactgggtaagagtaggataaactgtttggcaatttgtgctgcctgtttttcaaaaagatgaattccacccaaactttttagaacgttaaaattcttatcaatgctgtcacaaccatcaaaagcaatatcgatcttagtcgctgcagtagatggaagaagctctaatccgagttctttgcacctaaagcgagtaagttcggatggagaatataatgtgatgtctaagttatgctgtgcaatcgcttgagataacttaaatacattgcttccgccgccaagagaaatagtcattttcggcttgattttacttaaagcgaggtcacttatcgaattaattttcattttattttctcctgtgaaaattatttacaaatacatactaccttggtaaatgattttcgtcaatcaaaatataaatttattttctttaaaaataaaattgtgaaaattaattacattgatgatataattttggcacagaaaaggtgagaataatgactaaaattatcgatacaatctatagtaaattagcgacaatgtcagccagtgatcagaagattgctcaagtgatcttaaaacagcccgaacaggtggtaaattatacaatttcaaaattagcaactgaagctgaggtgagtgatgcttcggtgacgcgtttttgtcataatttagatttgacaggttttcatgatttaaaaattcaactagctcagaatgcaactgaaagtgtgtcacttcaaaatatgtcacgtgatgatgctagtgctaatttggaattgattgaaaaaaataaagtcgccgagattaaggcgactttggagaatgtgactgaagccaaattagatcaggtgctgcattttttgactgaaagcagaattgtgcaggttagtgcggagggcgatacttatccggtggccgctgatgcagtgtataagtttaatcagattggcttgttggcaattgattcaggtggcacgattgaaacggcaattgcgcagacaatgaacctgagtaaaaaggattgcttgttggtgatttcgaattcaggtgaagcagcgggaatcattaagcaaattaaggtagccaaacaaaaagggatgccggtgattgcgatcaccaatcgcgatgattcaccgattgcgctattagctgatgtgcatttaaagacagcagtgcggcagacggtgatgcaatcgcagtattatttctcacgcgtggcaagtatgacaatgattgaggcattatatttgttacttattgcgggggatgcagggcgagttgagcatattaaagaacatgaagcaattatttctaatcaaaaaatctaagagctttaatttttttaagcgaacaagtgttaaaattaccttttcttaacacacataagttctgtcataaatcaataacttgtttaaaacttcacaaaaatgtaatgttttgaatcttaattgtaaaagtccggtaactacagtttaacaaataaagggtagggtattactggtgattttaggaggtattcttaaaatcacacacacgagtcgatcctgtttttagtaatcgggttcgtaacatgctataattatttcacaagcagaagaagatataacttactgcttaggatgaatttctgtttcagaaaggaaaggccacataattatgagaaagaatacaagaattgtaagtatggctgctgccgctttgttggcagttgctcctgtagcagcttcagctgttccagttaacgctgctattagtttaggtacagtaactaacactactggtactacaagtactactacagcaacaacagcaaagccaacagatagatcatactttacatatggcaatcaagtaattgatgctgcaagtactaccgataaaacagctaatgttgtaccaactactatttctattaaggctaaagatactgtagctagtgttactaaggcaattaatgatttaggattagttttctttagtacgaataatgccagtggagaaaaagttaaccttaaagatagtgaagttgctgctattcttaagaatgcaggtgtaactcttgataaagataacaagaatattactgcggtaccaactagtgatttcaatcttactttaactggtacaggttctacttctacgcaaacagctactgttcaaatcccagttgtagtttcaggttcaagttcaactacagatactactcaaaatccagtgatcaattggtcattgaatggtcaaagcaaggggagtgttaatggtcaaatattccaagtagctgttggttcacaatttaatccaactaattttgtaaatagtaatggtgagccagttattatttcagctgtacaaaacagcaataataatacagctgcttcactagaagcaacttcaaatcctgttaatacttcagaagcaggacgttactataatgtaactttaactgctactggtttaactggtaagaagactactgcaacatacactgttttaattacttcaagccacaaacaagctctatatgctaatggcgcaagctcaatcgcaacttaccacatttatggcattaatgtaagaccagcttcaactactttcaaagatggtgacactgtttacgttgctgatcaaactagaacccttaacaatgtatcatactcacaagtttcaactaagtctaagtcagatgctaactcaagcaacatttgggttaagacttcatcacttgttaagccagctggtgacactaacaccaagactttgccagtaatggttgattcaagagcttatgacaagaacggtaactacttaggtcacatgtactacgcttacaacgacattgaaatcgttccaactgttgtaactatcaacggtaagacttactacaaggtggctaacaaggacgaatacgttcgtgtaaccaacattactggtaaccaacgtacttttaagcacaatgcctacatttattggtcatcataccgtcgtactccaggtactggtaagatgtacagaggtcaaactgtaactacttacggtggtcaaatgagatttaagaacggtaagaagtactacagaattgaaggctgcagaaacaacaacaagcgttacatcaaggctgtaaacttctattaaaaagtagaataatttaactgaaagagtcgatgcatttgcatcggcttttttcgtgtctaaatttttaaatttctgaaaaatttgcacttttttgagtaataaatagtggagggtaattttcctacttaagaaaaagaaaagaggtaaaatatgaggagaagaattaatcgatatcctcgaattactaacgacttggtattcggtcatgttatgagcaataaaaagaattgtctggaactgctacgtcggatgtttcctgaattaaaattgacaaaagttaatgtcattacccagtatgacggcaacattggactagaatccaaaaacattcgcttagatatctgggcacaagatgatcaaagtcgagtgtatgatattgagatgcaaacaacacgtaaaaatgatctagaaaaacggatgatgtactacgcagggatatcagcctgcagaaggatatcgactactacgtgaatagcggaaaatgggtcgaagacatgaataagccagaatatgagatgaatgaagttgctaaaagagctgcagaaaaagcgattaaagaagctaaaatagtagatgcaaaaaagtttattggctatgccaaaaatcatggtactaatttagaaaatacaatccaggaaacaatggatatgtatgatgaagttcttaatcgtaatgaaatcactaaattagtgaacgaaatctatcagcagaattagctaaataagataattttggaaaatttccctctagagtactactatcagtagtgctcttttttatataaaaaatatattgctgcttcgcactaatcaaaagcaaattaattgaaatatcttattaaaagataaataatgtaaccagttacaataactgctattacttaaaaacgacaattattgctgcattattaggaggtcaggctatgtcaaaaaagaaaatcattattgtaggtgcatcccacggcggccaagaggcagcttatgaaattttagatcgttatgatgatgtagacgttacgatttatgaagcaggcgacttcgtttcctttatgtcttgcggaatgaagctattccttgaaggaaaaactacaggccaagacaacgttagaaactttactcctgaagatttagttgaacggggtggtaaagttgttaataacacagcagtaacagctcttgatccagctaaaaagacggttactgtcaaaaacgtaaaagatggtacaaccaaagaagttagttatgataagctaattatttcttcaggtgttaaccccgcaagtttgcctcttcctggagcagacctgaaaaatattatgttgatgagaggctatgattgcgctacagagatcaatgcagctgctcaagatgaagctattaaaaatgttgcagttattggtgctggtaacggaattgcagctgccgaggttttcgctaaagcaggcaagaatgttactttaattgacggtgggcaaaaaccactagaaaattatttgaatgatacttatactagcttatttgaaaaagaattgactgatcatggtgttaacctggctatgaacactaaagttactggctttgttggcaatggaaaggtcaatgcagttcagactgataagggtgatattactgctgattgtgtcattattacagttggtattaagccaaatactgattggttgaaaaacacgatcgatctttatgacaatggctacattaaggtagacaattactttagaaccaatgtaaaggatgtctatgcaattggggatgcaatcttcccatttagcattccagctaacagaagagtaccgatgccatctgccattgctgcacggcatgaggctcaatatgttgttgagcacttatttgaagacaagccagaacgtgtctttaagggcttagttggtgcacaattgcttgaagcctttgatttacatgcagtaacaacaggactcagtgaaaagaatgccaagcgagcaggaattaatgcaaaagaaacagtcttaaagagttatcttcgtccagactatattcctgaaaaagataatcctacttgctatattgctgttgtttataatgaagacagccaccaaatcttaggcggtagcgtactttcatcatatgacattagtggccaagccaatgttttgagcttagctattagaaataagttgacactggaagatttagcagaagcagatttcttcttttcaccaacttatgacaagcaatggagtctggtaaatcaagtagcacaaaaggcattaggcttaaaattaactgtttagatataaatcaatttttaaattttgagaagaggtcgtcatggcttcttcttttttttgaaaaaagtttcaaaaaagtcttgcatttgatttggattttcgttattataattaagtcagctaacggaggagtagcgaagtggctaaacgcggcggtctgtaaaaccgctctctctgagttcggcggttcgaatccaccctcctccattgttgaacgacaagtaaaaagttcagctggtattgggttatagccaagtggtaaggcaatggtttttggtaccatcatgcgctggttcgaatccagctaacccaatagttctaaaagaacacccaacccgaaaaaagaaacgtcctatgtgacgtttcttttttttgccatttttgtatacgtattgattatagctattatacggaaaaagtatttgaaatttcttccgtattagatatacttgtaaaatgtaagtattaaacaaaaagtaagtaaagggtgagaagattgagacgtaaaaaatggattttttcaggagtgatgacagcagctgccgcattggtgctggcagcttgctctaacaatgacagtaatgctgcaccgactaagacaatgaatacctctgtcacaaatgaaatttcaactttagattcgagcaagtatggagatacgactagttcagaagttttgcagaattccatggaaggtctttaccgttttaataagaaaaatcagccagaattagctggtgcgacaaaagttgaacgttctaaagaccagaaggtctatacttttaccttacgcaataatgctaagtggtctaacggtgatccagttactgccctggattatgtaacggcttggcgcagaaccgttgacccaaaaaattcatctttagatgccgattcttatgccattatcaaaaacggtgaggcaatttctcaaggtaaagcaccggtaaattcattgggaatcaaagcactcggcaagtataaggtgcaagttacattagctaatccaattccatatttgccacaaatcttagagggtgcacaattctatcctcagaattctaaattggttaaaaagttaggctctaagtatgggactagcagtaagaatctagtttacaatggtccatttaccgtatctggttggacaggttcaaatttgaagtggacttacaagaaaaatccaacttactggaacaagaaaattgttgatttgaataaagttaacgtacaagtggttcaaactccttcaactggggttaacttgttcagaagtggtgaacttgattacacgacattgacttctgattttgttaagcagtatcaaaataattctagctatcataccaaagttacgccaactaatggttatctttctttcaacttgaagcgtaagagtacaggcaatgttcatattcgtcgggccattagccgggcaattaataagcaacagttagtcaagacagttttgcatcaaggcaaggtgtcaaatggaattgttgccgcaaactttattaccgatcaggcaactggcaacgattaccgcaaggatgctggcgacttggttacctataatgccaaggaagctaaaaaggaatggcaacttggtttgaagcaattgggtaagaagaagctaaccttagaattgcttacttcagatattgacgatgctaagcgtgtgggtgaatttattcaaagcaatttgatgaaaaatttacctggtctaactctacgggtacggtcaattcctttgaagtcacggctatctaacacaactaatcacaattacgactttgtttacggaacttggtagccaagttatgaagatccaattgatttcttgacagttggtggtttgtttaatttagcgccagattatcacaacgccaatttctggaagcaaattgacttggctcgttcaacttatgccactgatccgcagaagagattgaatgccttagttaacgctgaaaaacaattaattcaaaaggatgcctttgcggcaccactattccaacaaggtacgtcatacttattgaataagagagtgaaaggtttccaactttctccttatggtaatgtggcttattactggaatgttaaaatgaaatagtataagaagctaggaatcgaacctagcttttttgatgagcaaaaatacaacataaattaaagaaaattagtacaatagtaatcggtttttacgagatgaaaggataatggatggctaggataattagagtagggggatctagcagttcagtcagttggcacgaggttttaaaggatttgcgtgccgatgatgtgttgatgctgggccccggatattattatttgccgcagggcatcacactaacagatatcacaattaagggaacaggctctttgccagaagacacgactatttatggctatattagtgtttcagaagatagtcgttatgtaactttagaaaatttatgcattgatacaactaccgaacataatagcctatctgtaccagtaggcgttgatggctatttaactttgcgtaattgctttattaagggcacgggaactgatacagcagctatcgcggttaatggtaagatcacgttggaactttattcaaccaaaattgttaacggttcagtttccatgtatgaccatgccaatttccgtttggaaatgaatgattcagaaattgattatttctcggacaaatattgtgctttggcaattgaaggcgaaggaacagcaattgtaaataattcaaagattcacggcagtattaatacttttgccaaaacgaatgcggagttggatcttaataattcggaagtagattatgtattactgcatgggcaaacttggatgaatatgcttaattcaaaagttaagtctgctagcgattcctgcttttatttaagtgatgactgctggagcaatattatgaattctacttttttgggtggggtttatattgataaaaagacacggacaatcattcaaaattcaaccatcaatcgaatgatagtagttgatgaagcaaaagttacaatgaacaatgccgtaattttagctcatgcagattttcaagatcaggcgaaatgtgatgctacacgtgttaccttcactggaaatatgaactatgagtactttttagctttgagcggtgaagctaatatgaagggccacaatattgtgctgaatcctaatcaggctaacttagctgttaaagatgaagcaaaatttagtgccagtgtagttgctaatgataatgaacaagttgaagtggaatataacaagcgtccaaatgtttatattcttggagtgaagtggaccgctaagaaaaaatagtctgtaaaattgaagcagtgttattaatgcaagctagaccaatttagattataataatagcagtactaaactttgggggtggcgactatggaagaaccgatgtatatcaagattcacaatcagattaagcgtgatattgagaatcacgtttatcaagtaggggatcgtattccagcagaacgtcaattggcagttaagtttggcgtttcgagaatgactttacgccaagcgattaaaacattagaagatgaaggaattttagaacggcgcttgggtagcggaacctatgtagctagtcaaaaggttcaagaaaaaatgtcaggaattatgtcctttactgagattactaaggctaatggtcaagttccttcaagtaagttaatttcttatcagattggcaatccatctttatctgaaaaagagcgtcttgcgctaaaagataatgagaacgttttgcggatggagcggattcgctacgctgataagacaccaatttgttatgaagtcgtaacggtgccatactacttagtaaagaatttttctaaagaagatgtttcaacgcacttatataaaaccttagaaaagcgcggtggttttgccattggacgagtgacggaacatatttctgcatcaattgccaacgagcaagatgcgcgtcttcttaaagctaaaaaaggtgaaccgttaattactagacgacaggtaactgaactagcagatgggcaaccattcgaatacacccgcgcacgttacgttgcagaacgatttgaattcactttttctaagtaaacaaaaactccaatctcattcaaattgaatggaattggagtatttttttatttaagatcttctttaattttagtagtggaaattcctggcgttcttggcaggtaaaccacatcacaataaggcttaaggaagtcgaattttcctttccaatcatcgcccatgacaaaagtgtcgatatggtatttttgtacatcggtgattttttgatcccaatccttttcggggatgacttggtcgacataacggatagcttccaaaatgtatttacgttcagggtaggtattgtaggcttccttgtgttttttgaattcattaaattcatcggtagataaacctactattaaatagtcgcccaattctttagctcttttaagcagtcgcacgtgaccgtagtgaagtaggtcaaaggtgccataggtaataactcttttcattttttctcctttattaaaacaatcttatcatgtttgaataaaatataaaacttgaacatgtttctcgtacttgcgtgtcggaatggtagaatagaaactagataagaaaacgcatgaggtgtgaaaatgagcaaagttaatattttaggtgttgattttgataataaaacttttaaccaattccaaaatgaatttattaatcgactaaataatcacctgtcgacctttattgtgaccgctaatccggagattgtgatggcggcaaacgagaatcctgaatttatgaaaattctaaaaaatgatcccgattatattactgctgacgggattggcattgtaaaagcagctaaaatgcttaagcagccgttacctgagcgggtgactggatatgatttgtttacttggctgatggatgttgctagcgatcgtggtagccgagtttacttaattggagctaagccacaagtaattcatgcagtacaaagcaaaattgctaaggaatactcaaatattaatctagttggtgcagaagacggctactttactgaagatttggaactagtggcacggcgcattcagaaggcacaacccgatatggtttttgcagcattaggttttcctaagcaagaaaaactattatcaatcttacgtaagaacgaaacaccagctttgatgatgggtgtgggtggcagttttgatgtcttttcaggtatcgttaaaagagcaccagaagcttttcaaaagacgcatttagagtggttttatcgcttgattactaatcctagcagatttaagcggatgttagttttgccacagtttgttgtgcgagttaaacagtcaaaaaagaagggaaaataattttactaagatgaaggttttgcatgtaaatgctggtttagaaaatggcggcggtttatcacatattgttaatttgttaactgaagccaaaaatgaaggcaaagattttgaattattaacgctggcagaaggaccagtagcacaagcagcaagagcggctgggattactacacatgtgctaggagctaatagtcgttatgacttaggcagtttaggtagactgactaagtttatcaatgaggggcactatgatattgtgcatactcatggtgcgcgtgccaacttatttttatctttgattcacaagcgaattcgtgcaacttggtgtattactgtacattcagatccttatctagactttgaaggtaggggaatcattggcaatatttttactaaacttaatttacgtgcgttgagaaaagctgattgtattttcgtagtaactcagcgttttgccaagctactaattaatcgcgcacatgtggataaaaacaaggtacatgtcatctataatggcatctttttccacagtgatagtgaaattccagctaaatatgaacatacctattttaatattattaacgttgctcgtacggaaaaggttaaaggacaagaattgctcttaaaagctgtgaaaaaattagatgatcagcatattcgtctgcatatcgcgggtgatggtagtcagcttgaagcattgaaggccttgacgcggcaattggacatggcaccacaagtaacttttcacggttttatgactcaacaccaattgagcggattatataagcgaattgatctagccgtcttaacttcatattcagagagttttccacttgtgcttttagaggcaacagacaatttaatccctattttgtccacagatgtaggtgatattcataaaatgattccaggacccgaatatggtttcattgctaaaacgggagacattgattcaattgctaaagagattaatctggccgttaataaaacccatgaagagttacgccagatggctaatacagaaaagcggtatgcggaagagcatttttctattaaaaatcaactggactcaattgaaaaagtgtatctaattttgaggtaaaaatagttttgagaatagccaatggactgtaatggctgtataatgaaaaacgaaattgttaatttttaatgacagaaagagaagcaatgttttatccagaattagccaaagacgattcgttggctttacacactgatttatacgaaattaatatgatgtatacctatttcaagaaagggattgctgatcgcaatgccgtttttgaaagtttttaccgcagggaaccattcggcaacggttatgctgtttatgctggtttggaacacatcattaactatttaaagaatttaaagtttaccgaaagtgacctgcaatatttgaaagaaaatgaaggttacgatgatgactttattgattatttacgcaatctaaaattaaagctcactattcgttcaatgaaggaaggcgagctggtttttgctaacgagccaattttgcaagttgaaggtccacttgcccagtgtcagttagttgaaactgctattttaaatattattaacttccaaactttattggcaactaaagctgctagaatcaagttagctgttaaagatgatggtctaatggagtttggctctcgtcgtgcgcaagaaaccgatgcggccatttggggtgctcgagctgcttatattggcggctttgattcaactagtaatgttcgtgctggtaaattgtttggtattcctatttcagggactcatgctcatgctttagttgaaacatttggcagtgaatatgacgcatttaaggcatatgcggaaacacataagaattgtgtttttttggttgacacttacgatactgtccgtagtggtgtgcctaatgctatcaaggtggctaatgaaatgggcgacaagattaacttcttgggcgtacgaattgactctggggacatggcttacatttctaagcaagttcgtaaggagttagacgatgctggctatccagatgccaagatttttgcttcaaatgaccttgatgaaaacaccattactaacttaaagatgcaaggcgctaaaattgatgtctggggcattgggaccaagtatatcactgcttatgatcaaccagcccttggtgctgtttacaagttggttgccatggaagatgaattaggcgccatgcgggatacattgaagatttcttcaaatgccatcaaagtttccaccccaggtaaaaaacaagtatggcggattagcgcaaacactgctaagaaaaatgaaggtgactgggtatctcggtataatgaagatccacgcaaatttgacgcgctcttcatgttccacccacaatataactatattaataaggtggtaactgattacactgctattccacttttacatgatatttttaaagatggaaaattagtttatgatcaacctagtcttgatgaaattaaaaaattctgtgctgacaaccttgatggtttatgggatgaatataagcgtagcctgaatccgcaggaatatccagtggatttatcacaaaacttatacgaatccaagatggatttgattcaagacattcggcgtaaaattagagaaagaagcattggtcgatgagagaattacaaaaagaaattatcgcttatgaacatgttttaccagaaattgaccctaaaaaagaaattagacgttcaattgattttttgaaagattatttaaaggctaatccatttcttaagtcatacgtcttaggtatttctggtggtcaagattccactttgactggtaaattgtgtcaaatggcaattgaagaaatgcgtgaggaaactggcgatgattcttatcaatttatcgctgttcgtttgccttatggcgttcaagcagatgcccaagatgctgcagatgcagtcgcttttcaaaagccagatcaggatttaattgttaatattaaggaaccagttgatgctatggtgaaggttgtagaagcaactggtcaaaagattactgactttaacaaaggcaatattaaggcgcggcaaagaatggtagttcaatatgccatcgctggtgctaataagggtgccgttgttggtaccgaccatgctgcagaaaactttagtggcttttacactaagtttggtgatggtgccgctgatttgacgccattgttccgtttggacaagcgtcaaggcaaggctttgcttaaggaattaggttgtcctaagcatttatatgaaaaggctccaaccgcagaccttgaagaagaaaagccagatttgccagatgaagttgccctcggtgtaacttaccaagagattgatgattaccttgaaggtaaggaagtatcagataaaacagctgatcaaattgaaaaattatggaataagagtaaacacaagcgtcatttgccagttactgtctttgatgacttttataaaaagtaaaagcaattcgctaaaacttgtagatagctaaaattttgcttataattaacttgtcataagggagtaacagcaattgcttgcgatgaatccaacagccgaagtaagatacttctggatttatcttaattcgtgagacttatgtgctacaagcatgtaagtctcttttttatttttgaggaggaaataatgattgactaaaagataggatttgatagcaataaatagaaaaagatgcagttaatttgatcaggaagataaaacatagaaacaaattagctgctgctaaaaatttaatattttgttcgcttgtttttgtttcatcctttgctaaacttatgtttgcattggaggtgaaataaatgattaaaacacaggtagctgagctaaaaccaaacaagaccatgcaaagagaacttgaccgtctatgcgattaccgcagatactgctggaatctagccttagaaacctggcaagatatgtatgaagcacggactttaaataaggataataatcctagtcctaatgagtgtcgggtgcgagatgaattagtcaataacaaggctgattggcagtttaccttgtctgctcgttgtctgcagttggcagtcaaggacttggccaacgcttggaagagcttttttgacaaagcccagctcgactggggcaagccgcatttcaagtcaaagaaagctccacgtcaaggttttaagactgaccgagctaaagttattaatggcaagctcagactggataagcccagaggaattaaatcatggtttgatattccaacatatgaagcattgaggatgaaacaggttaaaattgccagcatctttagagaaagaggccattattacgctgctctttcctacgaagaaaaagctggaataaaggttaaaactggcaaaaagaccgccatcgatgtcaacgttgggcacttcagctatactgagggcagaatcaatattttgccggcaagactgcagaaactgtacaagcggatcaagcattatcagagaatattggccaagaaaagaagggttaatggaaaattggctggccgaagcaataattacgtgcaagtgagaaccaagcttcagcgtgattatcgcagggctgtcaatattcagaatgatcttttgcaaaaatttactactgagctggcaaataattatgaccaaatcgtcattgaagacttgaatgtcaagcaaatgatgatgacgcatgtggcttccaaaggcatacagaggtccttgtttggcaaatttagacagatattatcctataaatgtgcttggtatgataaagagctaattttggctgatagaagctacccgtcaacgcaaagatgtgccagttgcggctatgtcaaaaatggtgcagacaaaatcactttgcagggcaatagaaaacatggcaccaagcacaatgaatatgtttgttatgagtgtggctatagcaatgatcgtgatgacaatgcagtattaaatttattggcattaacaaaataaaaaataatggggctggctaagcccttaagctgcaggagttggtcaatgcgattactccccagatggaatatcggaataccaatgatgacgacagtaaataaaattaggaaaggaaaaatatatttttttctggtatgtggaaaatatcaaacttctgcatgtttctatgttttatatagcagagggaaaatggcgaaaaaatattatgtcgagtcgatccccgacattgaaaaagatcttaacacgtccgttaaggatgggttaagtgctagtgatgccaaagctagattagagcaatatggtccgaaagccttagcttccaagaaaaagcaaagcatgttcatgcgttttattgatcaattcaaagactttatgattattgttttgatcattgccgcgattttgtctggggtattagctcatgagtggactgatgccgcaattattatgattgtggtcattttgaacgcaattttaggtgtctttcaagaagcacgttccgaagctgcgattgatgctttgaaggaaatggctacgccggatgcgcatgtgcgccgtgatgatacaatcgttactattccaagcacagaattggttcctggagatgtagttttactagaagctggggatgtggttcctgctgacttacgcttgaatcaagcccacagcttgaagattgaggaatcagcgttaaccggtgaatcagttccagttgaaaagcatgcagaaactttagaaggtgaagacattgctttagctgaccgcgtaaatatggcttattccaatactaatgtgacctatggtcgtggtgaaggaatcgtaactagtacgggaatgcacaccgaagttggtaaaatcgctacaatgttgaacaatgctgatgaaactgatacaccgttaaagcgaaacttgaatcaactgggaaagaccctaaccatcatgattttggcaatctgcgttattgtctttatcgtaggagtgctcaaggctgattcagcagagcgtaactctactttaatgattaacatgttcttggttgccgtttccttggctgtagctgcaattccggaaggcttgccagcaattgtaacgattattttggcactaggtacgcaaacgatggccaaacataaggcgattgtccgtaaattgcctgctgttgagacattgggtgctacagacattatttgttctgataagactggtacgttgacccagaaccggatgacagttgaaaaggtcttctatgataaaaagttacatgataatagtgaaagtattagcgaaaataacccagctttattggcaatgactttggctaatgatactaagattgaaaatggcggagacttattgggtgacccaacagagaccgccctgattcaatttgcttttgatcaaaacattgatgtaactgacttgcttgaaaaatacaaacggattcaagaagtgccttttgattcagaacggaaattgatgagtactgttaataaagatggcgagcaatactttgtagcggtcaaaggcgcaccagatatgttgttacagcgagtaactaggattgaaaatggtggtcaagtagagccgatcacagataagcagaagcaaaatattttagcgcaaaacaagcagatggcgcaacaagctttacgtgtcttagggcttgcttataagaaagtcgaccaattgtacaccgatccaacaactgataatgttgaacaagatttaatttttgctgggttagtcggaatgattgatccagaacgtggtgaagctaaagcggccgtggctgaagcaaagagtgctggtattagaacagtaatgattactggtgatcaccaaacaactgctcaagcaattgcggaacgcctaggtattattgaaaaaggtcaggatagccgcgttttaactggggctgaacttgataaactagatgatgaatatttcaaacagcatgttggtgactacagcgtttacgctcgtgtttcaccagagcacaaggttagaattgtcaaggcttggcaggctaatgacaagattgttgcaatgactggtgatggggtaaacgatgctccaagtttgaagcaagctgatatcggaatcggcatgggaattactgggaccgaagtttctaaaggagccagcgatatggttttggctgatgataactttgccacgatcgttgaagcagtaaagcaaggacgcaaggtcttcagtaatatccaaaaggccattctatatttaatgagttgtaacgtgggtgaagtattaacagttttcatgatgacaatgctaggttgggatatcttagctcctgtgcagctcttgtggatcaacttggtaacggatactttgccagctattgctttaggtgttgaaccagtggaagttggaattatgaagcgcaagccgcgtggtaagaagtctaacttctttagcggtggtgttgccagttcaattatttaccaaggaattttggaaggaattttagttttaggtgcataccaaattggtttgcatgtcggtccacatgtgggtgatccatcgttgcaacatggggatgcattgacaatggccttcttgactttgggcttgattcagctgttccatgcaattaattccaagtatgtacatcagtcgatttttagaccgcatactttttctaacaagtggttcaatggtgcaattatcattgctgctgtaattatggcagcggtagaattgccatttatgactaagttctttgatgtgactgaacttgatggaccacagtggttagtcattttaattgccggaattttgatggttttgattgttgaaattgttaaattctgccagagaaaaatgggtaaagaataaagtttaacaaaaataaagaaaaaagcttgagtttgctcaagctttttttatatgctttaggtattagactattttaaggaagtattttaatgaaaagctttttattccgtctttatttggcttggatgagttttttggctagatttaccacgatggaaaacaataatgtggttatcctgaatggttcaggtaggtctggatctaacggctatgctttttacaagtggctgcaattgaatcatcctgaatataacgttacattagttgagccgtggccatcgtcacacttgaagtggaaaacctggcagaaaatcggagcagcgcgatatgtaattacaacgcaccaaccatttaaggtgcgcaagcatcaaattaatgtccagttgtggcatggcgttccactcaagcgcatgggaattatggctaataatactaagcgacgcgacaatcgccgtaacgaaaaattgtggcacaagaatgcggatattgttgcttctagctctgatctatatgaatcactaatgagtgcttgtatggcaattgagacaaaaaaataccgcaagctgggctttccgcgtttggatttattggctaagccggtaatttcgaagaaacaattgttggctgacttatttaaaactgaggacgatcaggcacagatcgggatctatatgccaacttttcgttatgaattggaagataaatccattatggagaaaatcaaagagagaaacttttttgcctttcgggattttgatgttgaaaaattaaatacagaattaaagaagcggcatcaatatctgattgtaaaattgcatccctatgaaatgcgtttatttgccaatttcaagagcagttattctaacattgctttcatgaacaatgattacttgtttgaccacaattatgatttgtacgaattgctcggtgatactgatttcttgatgacagacttttcgtcaatctactttgattacttgcacttgaacaaaccgattgtgtttgtgactaactttttagagcaatatgaaaaaacgcgcggattactaatgggaccatatgctgagattactcccggaatctgtgttaattcagaggatgaactaattcgcaatctggatcaacttgataaccagcagattgctaatcgccgtctttactggctacatttgactaaccaggtgcatggtgattcatattgtgagaacgtctttaagtacatgacgcaggaatatcgaggttaaaatgcgtaaaacatttttaaacatcttatataatgcggtttatcagatttttattgtattggtgccactgattactgtaccgtatttatcgcgtgtcttaggtcctaagacttatgggatttatagcagtgtgaacaatacggtgcaattcttgatgattttttgtattctgtctgtgtcgtatgtagggatgcgcacaatttcacggacgcgcacttatggtacaccgcaggagctaaccaatgctttctgggggttatggtatttccaaggaatcgccggtattatcaccattttagtcacggtttttgtagcgactgtatttcacgttcaatattggttttatatcttgttgatggtgccatacttgatctcagcacaggttgatatttcatggttctttcaaggactagctgactttggtcgtgttgttttgaaaaacacggcggtaaagttagttagtgtggttctaattttattatgggtaaaatcacccgctgacttgtggaaatatttattgatcatgtcagtgtcgacaatgctaggttcctttgtcttttggtttgatatttggcgctatgtaggaaaacccattgctcatttttacaaatttaaacagacggcaattgcaattggtactttgatgattccacagattgcgactcaaatttatacttcgctggataaaccaattttgggttggttttctaattcgactcaggtttctttttatgacaattcacaacgaatttcaaatatgattctgggtgtaattaccagtatttcgctagtcattatgcctaagatggcgagcgaaggaaaaaaggcacaaaagatagtgatgaaaaaatcactggaagctactgtaatgctgggtaccttgttcgccgtaattattatggcaaataccaaacagtttgtaccatttttctttgggaataaatatgttccgatgactccattaatgttttggtttaccttaacaattatcatgattccgactggcggggtatttgctaaccaatttgctttggctaaccagcgagacaaggattatgctgtgccagtagttattggggcaattttagaaattgtcttgagttatctcttagataggccatatggcgcaggtggggctatgattgcaatattaattactgaagcagtagttttaattttgcggctctgggttgtacgtgatggctatgaatttagttatgttttccatgacgtgcccaagtatttgttaattgcggtgctaaccttggctattggaatgtttatgcctaatataattccatctgtctttttcgatatggcttttaagtcaattgtcatgttaattatttatctgacattgatgttcttgttcaagcttgattttaatgatgatattgtgaagctaattaagaactttttgaagcgaggttaaaaatgattcctaaaaaaattcattatgtttgggtaggacacaatcctaaatccccgataattgaagaatgtattgcaacctggaagaaaaaattgcctgattatcaaattattgagtggaatgaagataattttgatatgcatgagaatcgttatattgaacaagcttatgctgcaaaaaaatgggccttcgtgtcagactatgttcgagcacgggctatttatgaacaaggtgggatatatttagatactgatgttagagtcgtggataagttagatagtcttttgaatgcttctgcctttattggttttgaaaaccatgattatctgtcagctgcaatttttggtgcagaaaaaggccacccatttatgcaggatattttggattattatcaagatcgtgattttgaatatgacactaagaatcagatggcgggagtaaatagtatttccgttactgaaatgctggtaaataagtatggcttaaagctaggtaatcaggagcaagtgttaaaagatggcattcatgtctattcagatggagttctgtgtaatccttctaaggactccaaatcgattcacttattcactggaacctggatggatggtaaaaagtcattcaaacatgacttagtaactttcttgaaacgacacattagtacgcctaagcaggcggggatgtatgccaagatatttaggtagcaaaaaatcagcgagattaaattcttgctgatttttatttttggaataaaattttatccatgaatgagaatgaattacaaaatttagttgaaaaaatttcgttaaaatattttgatcgcccttttaagcaccttgtaaaaattaatcggcgaatgaccacaacaggtgggcgttatcatttggatgatcaccatcttgaaatcaacgcgcattttttagtaccacaatatcatgattatctagtaggaatcattaagcatgaattaacccactatcatttgcatttattgggcttgggttaccgacaccgtgatcgcaattttaaaatcttgctgaaaaaagttggaggcagtcgttatgcacctgatattggcttacgtaaaaagaaaaaatatcgttacctatatctttgtgaaaactgtgggttgagatacccaagaatgcgcaggattaatacacaaaagtatcgttgtggtaaatgtaggggacacctgcgtttagcgcaaacttttgcgtaaaatgatcagaaatttaaaataatttatattttttcttgcatctcaactgtatttaggctattatagttgatgtgccgcgggcgtggcggaatggcagacgcgcaagactaaggatcttgtgatcgctttagatcgtggaagttcgagtcttctcgcccgcactgattgaggagtcgcagtgagcgacttctttttttttactcaaaaatcggttatactttaattagtaattaaagggaataaaactatggcaagaaaacgtaaatcaagagtaccaaaaagtgtcaaaaccgttgtgcgtgtattcgtaattctatttattctgatggttgcttttgtcggctttagatattataggcgttacgcgattcaatcagagcagattcaacaagcacagctgcaaaaagaacaggaagcagcaaaactattaaaacagaaaaaagactttatcaaaaaaattggtccgattgcgcgcgaagtggacaagtcgtatgacttattgccaagcatcacgattgctcaagcctgcctagaaagtaattatggacaaagtgatttgtcgcaaaaatacaacaatctttttggtgttaaaggatccaacccgaacacttcggcagtgatgacaactaaggaatatgtaaagaacaagtgggttaccgtgaaggcgcgtttccaaatatatgactcatatgaggcttctattcgggctcacgctagattattccagaatgggacaacgtggaaccacgatcagtataagcatgttctagcatccaaagattataagacacaagctaaagccttggttaccgacggctatgcgactgatccggactatgccgataagctgattaatttgattgaacagtttgatcttgaaaaatatgataagtaaatctaaagcagcgaattagtcgctgcttttttggtataatattcaagttgcattaatgaaataatttttagtgaaggggaaaataatgagcgaaaaatctatcttagctggtctgaatccgcaacaaaaagaagcggtagaaaccactgaaggacctttattagtcgttgctggtgcgggttcaggtaagacttctgttttaacgagacgaattgcctatttagttgaagaaaatcatgttgcaccttggaatattttagccattaccttcaccaataaggcggctagtgaaatgcgtgagcgtgaacaaaagttgctgggaccagcagctaacgacatttggatgtcgactttccacgctttgtgtgtgcggatcttgcgtcgggatgcagataagattggttatggtcataatttttcaattgctgattcggccgagcaattaactttggttaagcatattgaaaaagacttgaatatcaatcctaagatgtatgatccacgcggtattttagccgcgatttctaatggcaagaatgacttgctggatcctgaagcttttatgcagagtgcattgtcaccatttgagaagatggcggctaaggtgtatgaagaatatcaacgtagattgcgccgtgatcaaattatggactttgatgatttgattatgcagaccctagttttgtttaaaaaagatagcgaagttttgcactattatcaaaacaagttccgttatcttttagttgacgagtatcaggatactaaccaggctcaatatgaactctgtcatgctttggctgcacaatacaagaatatttgtgtagttggggatgccgatcagtcaatctatggctggcgcggtgctaatatggaaaacatcatgaattttgagcaggattacaagaaatatgatgttaagactgtgaagctagaacaaaattaccggtctactggtcacattttgtccgcagctaactcggtcatcaaaaataaccagaaccggaaggctaagaacttgtggactgatcaaggtgatgggcaaaaggtaacctactatcaagcccaaagcggtgatgatgaagctcactacatcatttcaaagatccaagaagaagttaaagataaaaaacgggcttacaaagatttcgcaattctttatcggactaatgctcagtctagaacagtcgaagaagctttcgttaaaagcaatattccttatcaaatcgttggtggacataaattctatgaccgcaaagaaattaaagatgtgatggcttacttgaagttagttgctaatccagctgatacgatgagtatgaaccgaattattaatactccaaagcggggaattggtgccgctactgtggataagttgttaacatttgcggatgagaatcactacaacattttggatgcgatgggacatgtggctgaaagttcaattaatactagagcagccaagaaattaagcgattttggtactaaattacgtgatgcaattgcttatgctcaaaatggtacagtaaccggtttaaccgaaaaaatcttagctgattttgattataccgatgccttgcgagctgaaaatacaattgaatcagaaacgcgtttagaaaacttggatgaattcttgtcagttactaagcgttttgatgatcattatgagcccgaagaagatgagtctaatccattaagcgacttcttggctgaagtatctctacttagcgatcaagatgatcttgatgaagatgacaatcaagtagctttaatgactttacatgcagctaagggactagaattcccagtggttttcttaattggcatggaagatgggcttttcccgttgcaacgtgcaatgatggatgacaatgaattagaagaagagcggcgcctagcttacgtgggaattactcgggctaagcaagaactgtttttaactaatgcttactcacggatgatgtatggcagaatgcaaaataatccgccttcaagattcttggacgaaattgatgaacaggatctgcacaaagaagaaaatgaaaaattacaaagcagctttatccaatctagctttgagaaacagacggcaccatttgctcgcaaagccgaacgagctcgcgctgaagtttatactgctaagaaagcttcaggcgctgtcggtgctgaaaagaagggctggaatgtaggcgaccaagtcgagcataaagcttggggacatggtgttgtaactaaagttaatggcactggtgaagatatggagctggatattgctttccctggtaaaggaatcaaacggcttttggctgcctttgcgccaattaagaagatataattaaagaaagattgatttggatcaggagggaaaaatggcagaaattactcttgatgaagctaaaaaagaagcggcttcacttagaaaacagcttaatgaatgggctgaggcctattactctaaggacgcgcctgaggttgaagacaatgtttacgaccaaagctacaaccgcttgcttgaattagaaaaagaatttccagagattgtgacacccgactccattacccaaagagttgggggacagattgatagtgattttaccaaggtagagcacccgattccaatgctgtcaatgggggacgtcttttccaaagctgaactgaaggattttgatcaacggatgcaaaaattagttggtcatccagttgaatataacgtggaattaaagatcgatggcttatcactatcgcttgaatatgaaaatggtaagttggttcgtgcctcaacgcggggtaacggttatgttggtgaagatgtaacagctaatgctaagtatattagtgatattccacagactttgcctgaaccgttaacaactgaagtgcgcggtgaatgttacatgggcaaggaagcctttgccaagttgaatgcagaaagagaagagcaaggtctagtagtttttgctaatccacgtaatgctgcagcgggttctttgcgtcaacttgatcctaaagttaccaagaagcgtcaacttagtacctttatttatacttgggttaatccgcctgaagaaattactagtcagcaccaagcaattcaaaaaatgcatgatttaggctttcataccaatgaaaccggtcgtaagttaaaaacattagatgaagtttttgcctttatcgatgaatacacagctaaacgaaacagcctaacatatggtattgatggcattgtgttaaaaattgatgatctaggaattgaacaagagctcggtaacactgttaaggtgcctcgctgggaaattgcttataaatttccacctgaagaacaagaaactgtagtgcgggatatcgtttggactgtcggccgtaccggagtagttactccaactgcggtcatggatccggtgcaactagctggtacaactgtagctagggcttcattgcacaacccagattatttgaatgaaaagggcgtcaggattggtgataccgttaaactgcataaagcaggcgatattattccagaaatctctgaagtcgtcatggctaaaagaccggcagattctgtagcttatcagattccaacgacttgtccatcctgtgggcaaaaattagttcacctagaagatgaagtagctttgcgctgcatcaatccatcttgtccagctcaagttgaggagggtattacgcactttgcttctcgaccagctatgaacattgccggtttggggccaaagatcgttaaacaattgattgctaaagatttagtgcataatgtggctgatctttatcacttaactgcagatgatttagcacaactcgatcattttaaggaaaaatcgatcaataatttgttaactgccttagacaattcaaagcaaaactcagttgaattattgattactggattgggaattgaccatgttggggccaaagcagcacgcttaattgctcaaaagtttaaaaatctggcaaagattatgtctctagacgtgcaagaaatagcttctatcgatacaataggcatgacgatcgcggaatcaatgacaacatattttgctcaaccagaagcacagaaggtaattgatgagctgcgtgagagcggcctgaatatggattacttaggtgcagatgagcctgcagaaattgaagataatccatttaaggataagactgtagtgctaacaggtaaattagagcattatactagaagtgagtttacgaaaaaattacaagctttaggtgccaaagttacgggttcagtttcgcataagaccgattacgtgatttatggcaaagatgctggttctaagtatactaaagcgcagactttaggcgtaccacttttgactgaagaagaagcaattgcacaaattgaataaaggacaattattgtgaaaaaatatttgcaagtaatggctttagctggaatcgcgcttactctaagtggttgtggtaagttgaaggattctagtttagcaaataatgcgacaaccacttcaaccactaagaaaaaaagctatcaaactactaacacgggaacgaatggctataccgttttaatgaaaaatggtcgctataatattagtccgattgcaggattaacagctactgataatgataattctgttgatacgcgtgaattagagcgagggctgattcaaatttctaagaatcaattttcgcctaatcaatacgtcttccaagaaggacaatatttggatacctcaactgtaactgattggttaatgcgtaaatccaaatcaaatcctgatggtttaaacccagtaaataatggtaagaccggaaccgatacgcgtaatccaatttatttggaagaaattatcgaacaagattatttgactggatctggttccaagtataatttaggtggtatgagcttgggcttagccatgaattcggttgattattatcagaaaaagcgtaacggtgcagaatttcaaactactatttcacgtgctgaacaaaaagctcaaggtgaaaaaatagctaatgaaattgttgctcgcttgcgtaagaagaaagctttaaagaatattccgattacgattggtttattctccaagactggaaaagattcattagttggtggaacttacttcgcttacgggacagcggccgctaatagtagtaaaatatctaaatggaaatccatgtcggaaaaaatgcaagttttaccgacaactggtagtgaaaaagcaattaacagtgatgatgcatcgcacttcaatgatttcaagacggctattcaaaactacttccctaatattagtggggtaacggcaactttgcgttatacaaacggtaagctttcacaagaaaacatttccgtaacaacgcaattttatggctatgaacaaattcaaagttttacccgtttggttttgtcgtcagctaaaaagtacttgtctggcaatatcccaattgaaatcaaaattggttcagtagatgatgtacaagctttagttgcaaaagaaaccggcgatagtgattatcaagtccatgtttatggcggcgaataggaggtatttgcgtggaaatcacaaaagataccattaaacacgttgcgactctttcgcgacttgcgtttaatgaagaagaattagataaatttactgatcaaatgggatcaattatcaatatggctgatcaacttagtgaagttgatactgagggtgttgatgaaacagttcaagttgttgatcgtgatactgtcttcagagaagataaacctgaacactggcaaggacaagacagagaaacattgatggctaacgttcctgaaaaggcaaacggctacattaaggttcctgtaattattaataaggatgaggacgagtaatgaattacttaaacgaaaatattgattcattaaacaaaaagcttgccagcggtgacttgtcagcagataagttagctaaagacactgtggcaaacattaaggatacagataagaagttaaatgcttggatcactgttttagatgatgctaagcctgcagataaccttgactactccaagagtaagttagcaggtattccaatcgcaattaaggataacatcatcactaacgggattaagacaactgctgctagtcacattttgtacaactacatgccaatgtatgatgcaacagttatttctaagcttaaaaaagctggtgcaacctttgtaggtaaaaccaacatggatgaatttgccatgggttcatcaactgaacactcatattatggtgctactcacaacccatggaatttagataaagttcctggtggttcatctggtggttcagcagctgcagttgctagtggtcaagttgtagcagcacttggttcagatactggtggttcaattcgtcaaccagccgcatttaacggtatttttggtattaagccaacttacggtcgtgtatcacgttggggtcttatcgcatttggttcttcacttgatcaaattggtgtaatgactaagcgcgttaaggattcagctgaagtattaaacgtaattgctggtgcagatgagcatgactcaactgtttcaacccgtgaagtacctgactttaccaagtttatcggtcaagatgttaagggtctccgtgtagctgttcctaaggaatacatggaagcagttagcggcgaaatgcgtgaagttattcaaaagcaaatcgatgctttgaaggatgctggtgcagtgatcaatgaggtttcattgccacatactaaatacgttgttcctgactactacatcattgcttcaagtgaagcttcttcaaacttgcaaagatacgatggtattcgttacggctaccgtgctaaggacactaagaacttacttgatgtttacgttaaatcacgttctgaaggctttggtgctgaagttaagcgtagaattatgcttggttcatttgccctttcagctggttcatatgaccgtttctttagacaagctgctaaggttagaaccttgatctgtgatgactttgacaagatctttgcagaaaatgatgtaattgttggaccaactactactgagccagcatttggtattggcgaagaagtttcagacccaattaagatgtacaacaatgatattttaactatttctgccaacttagcaggtattcctgcagctagtgttccagctggtttagttgatgggatgcctgtcggtttacaagttatggctaagcgttttgatgaaggtaatgtcttcaagactgctgactttatcgaacgcactaacaagttttatgaaaaaacaccaactggaatggaggactaattgaatgaattttaaatcgactatcggacttgaagtccacttcgaattaaagacaaagagcaagattttctctccttcaccagtaacctatggtgctgaacaaaacacggagactaatgttattgactgggctatgcctggtaccttgccaatggttaacaagaatgtttaccgtttaggtattatggttgccttagcaacccacgctcacattttgccaactactcattttgatcgtaagaactacttctatcctgataaccccaaggcttaccagattactcagttcttccaaccacttgctcgtgatggttacatcgaagttgaagttcgcggtaagaagaagagaatcggtatccacgaaatgcacatcgaagaagatgccggtaagaacactcacggaaccaacggtttctcatacgttgacttgaaccgtcaaggtgttccactgcttgaagttgtttctgaacctgacatggaagaccccgaagaagcttacgcataccttgaaaaattacgtaagattgttcaatttactggtgcttcagacgttaagatggaagaaggttcaatgcgtgttgataccaacatttctatccgtcctgcaggtcaaaaggaacttggtactaaggttgaaatgaagaacttgaactcatttgatcacgtacgtcgttcacttgcatatgaagaaaagcgtcaagaacaagttcttttggctggtggtcacatccaactttcaactcgtcgttttgatgaagcaactggtaagactgttttggaacgtgttaaggaaggtgcatcggattaccgttacttcccagaaccagatattgcaccagatcatatttcacaagaatggatcgatgaaattgctaaggaattaccaaaggggccatttgctcgttacgatgactatgtaaataaatatggtttgaagccatatgacgctaacgttttgcttcaaactaaggaaagttctgacttctttgatgaagctgttgcggcaggtgcagatccaactctggcagctaactggatgaacacacaagttaatggttacttgaacgatcaccgtgttgaattgaaggatattaagttaacgcctgaacacttggcagaaatgatcaagttaattaaggatggtactatttcatctaagattgctaagaaggtcttcgctgaaaccattgaaaatggtactgatcctaagaagtatgttgaagataatggtatggttcaattgtcagatacttctgttttagctccaatggttaagaaggttgttgatgataaccctcaatcagttgaagactttaagaatggtaaggatcgtgcaatcggcttcttagttggtcaaatcatgaagcaaactcgtggtaaggctaaccctaagatggttaacaagttacttaaccaagaattgcaaagtcgttaatttttagaacgttaggtagtaattatgactagaaaagcaagattaatttataatcctgtatcaggtcacgaacagatgccaaagaatgtggccgatattttagatgtattagaacaagcaggctacgaagctagtgcttttagaactacacctaaagaaaatagtgctcgcaatgaagctactcgtgctgctaaggaaggttttgatttaatcgtagcagctggcggggacggtacaatcaatgaagtagttaacgggattgcctttttagaaaacaggcctaaaatggcaattattcctgctggtactactaatgattatgctcgtgcattagccattccacgtgataatattccagatgctgctaaagtaatcttaaagaataaaactcgtaaaatggatatcggtaaagctgtttttggtgaccaggttcaatattttgttaatattgctgccagcggttctttaactgagttaacatatggcgtaccatctgaggttaagtcagctttgggttatgccgcatacttaatcaagggggcagaaatgttgccacacttgactgagaatgagatgcgtttgacttatgatgatggcgtttatgaaggaaaattatcaatgttcctactaggaatgactaattcaattggtggttttgagcaagttatgcctgatgcacagcttagtgatggattattccaattgatcgtggtcaagccttctgaccctgttagcatgatgaagttgatggcattggctttgaatggtaagcacgttgatgatccaaatatcatttataccaagacccgcagcttgaaggcggaattgattggtaaaagtgaaggacaagatttgccagttaaccttgatggcgaaattggtggttattgtccagttgaattcaacaatttacaacaacatatcgaattttatgttggtggataaaatttaagcaaaacaaatagcgttgactagtgtaaaagctaatcaacgctatgtttgtatggaaattaattaatcgcgatctccgcccatgccaaagatttgtagcaagaacatgaagatgttgatgaagtcgagatacatgcttaaagcccccataacggctaaaccagtatctgaaacttgaccgccgtaggtcatgaaaatcttcttagcattgtgtgcgtcgtaggcagttaagccagtgaagattaacacaccgatgcaggagaagataaaggttgcagcgccacttctaatgaagaaggcgttaacgagccatgcaactaagaacccgatcaaagctgcgccaaggtatgaaccccagttgctcaagtcgcgcttagttacagaaccgaagacggccattgctgcgaacacgccagctgctgataaaaaggcaccagcgattgaagcggaagtaaatgctcctgcgataaaggcaaattcgaagccgtagactgcggaaagaatcaacagaagaacgatgcctaatgttgggttctttgctgccttaaagctgattgtcatacataaaacaattggaacaaatacgatgatccagtaaacggcttgtgacatgttagcaattgcagatgcaaacacagtcgtagtcaagaatgcagttgctgcagaaactaaaacagccaaaatcatgagactgtacatcttagtcaagaagctgttaactgcagaaatatcctggacttgacgccgtcctggagtatttgaaaagttatccatgaaatatacactccttttatttacttgtcttatctattttaccgtatttagtggtcaaatgaataatagtaaagtttttcttatgaaaaaactaaagtaggcagaaagatgtctaaagaaaatcgcctcctgtatagtgaagatataaaggaagtgattttgatggaaaaaagatatattgacaatgacatccgtggtcaaagaagtgaatatccagataaaataggtgaattcagacgggagacgatcttgtcctttactccagaagcggcagaaaaatatcatcagctgacgagttcgcaaaaaacatttattgatcgggagctggatgatttaaaatttaatcaagataccactatcaataaaaaagtaaatgcggaattagaccaagcaatcgtctttgaacgaaatgatcatgaaataataattacagatatagttgctcaacctacgcgtgacagtcaggaatatcgacgtgcgcaaattaggatggaccgacagaaccattaattttaagccaaaggtggtgaactacataaacagataaatatgaagcacaccatgtacaaatccaaagtagtaagacagctaaataaatattttgtaaagctagctgtttaaaattaaaatattgccaaaagatacgatcccaaaaaacattggctaaaaatgctcgataagcataaaaagctagaaagtgaattgattttagccagtagttcatattaaagactttttgtgcaatacagattaggtaaatcaagaggataaccgctaaagcataaattgccattgaaggtaggtaataactgtcgttggttaggtctgttaatttgaaagtggctaaaaataaatctctggtcccaaaataggttaaaaggtaaaatcccacaattagccaccaatatgtaaacagaaaagtttgaatttcatgatgaaaattccagcttaagccaccgtagagcccaaagatcaaaaagctgataaagatacgatctaataaataccaatgggtagcctcgggaccatttaaaatgaagtgatcataaaaaattaaccaggcaaagtaaataattccggaactaataactgcgattagtagtcgtcgataagaatgctggacccagttgcagactgatttgattccaggcatgataagcaaaaattgcagcatcatgacgctgtaccaaagatgaggtgtggcattatcactgaagaattgccagatgaatgtggcaatattgtgaaaatgcccgtgttgctgcagattaggcatagcaatgagataaaataaagtccaagcaaaagtaggaaagaagttattatcccactggtcggaaaaatatgattttaaaggtaattttgcctgctggtcatttttcctaattacggtaaagacaatcccaaaaatgaaggctggtgaagtgaatttgacgaggttataaagtgataccaaaaagagctgctgtgaatgatcgaatggtaatgtcaagaaaagagtaataattggttgcaacatgacacaaccgttagctagtagattgcgtaaaaaagttcctaaagacgatggtcttaggaacttttttactgatatgattattttctacttttctttagcccacttcaagccgattccggtgattccgctcaaaatagagaagattggtgaaagaagactgaagaagacgaatggtaagaaatgtaaaactggcacacctaaagttgaagcggcgaatgaaccggcaacaccccagggaattaagtagttaattacgctaccgccgtcttcaagtacgcggctaagggctaatggtgaaagcttaattttatcaaaagccggcttaaatgcacgaccaggtaagataactgataggtattgttcaccaacaaaaaggttgatacagataccagataaaatggtgaccgtaattaaacgaccaggcttggttaaatgtttaacgagtggttccattgcactttgaacaatgttgaacttcatgagcatcccacccaaagataaggtagaaatgatcaaagctactgtagccatcatgttggaaataccaccacgggttaataaggcattaacagaagcatcactagttttagccacaaagccgttcataactaaattgttaagcgattgaatagattcgtggggactttgaataaaaatcatgattacagtaatcgcaatgtttaaaaagagcgtagggattgcggaaattttgcgccaagcacaaaagatcatcaagataattgggacaattgcccaccagctgatactgaagttagtttgtaaaatatgtgaagtacgttcaatcttagttggatccatgttgccactgttgcctaagatccagaataaaattaatgaaactacaaaagcaggaatggttgaccacatcatatttttaatgtgggcgaataattcactttcggcaactgctgaagaaaggttggttgaatcggataaaggagacatcttatcgccaaaaacagctccagagataattgccccagcaactaaggcaggattaaggttcatactagttccgatcccaaaaagcgcaatcccaacagttgagattgtggtaaaaccactaccgattgccatcccaataattgaacaaacaataaaaacagatggaacgaagaaactaccactgattaagtggaaacccaggaccatgatggaagggataattcccgctttaatccagatcccgatcaaagcgccgattaaaataaagataaaaatcggaataatggctacactaattccttctttgatgccatcttgaacatcttgccaggaaaagccacgcagtctagcccaaaaggtaagtaaaaggacaatgaataaaactggcacttctggagaaagggcaagcttgataactgccaatcccagaatagtgaggagtgcaattaagataataattgattcagtaaaggaaactttctttttcttcatttttatattcctccaaataaaaaatcccgttgacttattagtcaacgggacgacaatagccgtggtaccacccactctttcaagcataagaacttgaatctctatcagatggtaacggttctgaatttttccgaacaacattataacgatgtatttcgtcaagctttgcctgcctggtttgcagctaccaccagttctctgaacgctgagcaaagttgctacttttcgtttcttgttgagcaatatgatagcaagattaaaaatatctgtcaatagatttaagcaaaatctttttgaatgtgacgtatttatagaaaagctatttttagtatagtgcatgaaataagagcagtgaaatttattgcggtaattatgctgttcatgtttttattaaaatgacttgaaaaaacatgtttctaatgaagcatgttttttcattgcataaaatcacacaatagttgaatctatttagatactagatttacaattgaggaaatatagttattacattgcttgggatagtaattaagaggaatctttatgcataaaaaacgagctttatccatctttttggcactttgtgcctttgcaatatttttattcattgtgcagccaggggataagctggataatggcattaagaatcagaaagaacagctgcatgattatatgaagtttcatcatatcaacggtgtaatgttaattaatgataaaaaggggcaaccgattgttgtccaaaataaggagaccactgattcaagccaaatagttaacgctaatcaattgtttccgattgcttcgctacaaaaaattatgacaggaactgcaatttatcagctgcaacaagaaaagttattaggttggaatacctctttatctaactattatcctcaagtttcaggtagtaaagatattacaattcgtgagctgatgaatcatactagtggcttggttaacaatgctcgaccatcttctccgcttaaaaatcagaaagagcaaatagcttatatgcttaatcacatggagaatgatcatcttcatacttgggattaccaagatgttgattatgaattgctagcagctattattagcaaacaaactaatttaagttataatgcttatattcagaccgattttgctaagccacttaagctccagaaagttaaggatttttctgaggttaaccaaaacgagatccctcagccaatgagtaaaaatgttgactggcaccaagtgacagtgacgacgtcgtcggactttggagcagggaacttattcatgtcaccaattgattattggaagtttgtatataacgatgtgctgaaaaatcctaaaatggtaaacgagtattaccaccaagcccagcatcagacggtagcttattttggtggagtgtattttaatggtgacatcattcgcgctaatggcagtatccctggttataattgctgctttgttgcgaattacaagaccaagcgtatgattatgctattttctaataatattaattatttgaggttgaaagtagcggctaaccacattttgcatgcgtatatgggtgatagttggttctaaaaagcagtcgattattttttgaagcacaaagattggtcaagtattataataatagagagctatttttttaaggttgagtgagtatgaaaaagaatcaaattatagatttagaaattaccgatctttcgtatgaagcaatgggtgtggcccattacgagggaatgaccgtatttgttactaatgcacttccaggtgaagtggttagtgcaaagattttaaaggttaagaagaactttgctttggctaaaattgaagaaataaaaaaagaaagtcctgatcgagttaagatcaagttgaatcaatgggttcaaacgggactcgcttctttagctcatatcaagtatgataagcaacttgaattcaagcgtaatcaagttgttaacttacttaagaaggcacatttagatgagattgaagtaggacaaactttgcctagtcctgagcaaacagggtatcgcaacaaggcccaagttcctgtgcgagaatataatggacagcttgagattggcttttttagacgacattcacatgatttagtgcctttgacaaatttctttaccactgatccggaaattgatcgtgtattggttgcagtgcgtgatgtgttgcgcaagtacaagattgcgccttatgacgaggtaaacaatacgggaattatacgctatcttgatgtgcgtcgtagtaaggctaatggcgagataatggtcattttggtcagccgggttaaggatttcccacaaatgatgggtgttgcagctgagattagccagattcctaaggtttcaggtttagtcttgaactataatcctaagaagaccaatgtgattttgggtaaaaaggattacctagttttcggtaatgaccagattactgatcaaattggtgatttaaagtttagaatttcacctcaaagtttcttccagattaattcgctgcaaacaccgcgcttgtatgatttagcgattaagcaagcagatttaggttcggatgatgtagtaattgatgcatattcgggaattggaacgattggtttgagtgtagctaagcatgtgaaggccgtgcgtggaatcgaagttgtccgggatgcgatcaaggatgccaaggacaatgccgagctaaatggtattgaaaacgcaaagtattacttaggcaaggctgaagaaataatgccgcgttgggctaaaaagggtatgaagaccgatgtggtttttgttgatccaccgagaaaagggttgacacctgaatttattaatgcgacagttaagactggacctaagaaggtcgtttatatttcgtgcaatcctgcaacaatgattcgcgacttgcttttgttccaagaacaaggttatgaatttaagcgaatcgatcctgttgatatgttcccacaaacgccacatgtagaggctgtgactgttttgacaaagaagaagtaaatatgattattaaaccattaattagtgaagacgaagcaaaacaaacaagtaagcttttccaaacaacttggcaagagacgtataaaggcgtgctaccagatgtatttttggataatattccggctactgcttgggtaaaacgactcaatgagagtggtcgtcataatttagtttttaaagacgataataacgaggttcaagcagccgttagctatggtcgtccacgtgacactagaatgcttggctgcggtgagttgatggcattatatgttaaacctgattttcaaggctacaatgtaggtaagaccttgctaaatgccgcagaaaatgaactgaagaagatgggctatggcaagatttacttgtggtgtctggctgaagataaagatgcacaagaattctttaagcactttggctggcgtaatattgctacccaacgttttattgaaattgctggcaaagaatataagtatttgctgttccagaaaaatttacatagttaatgaagccgaaaggctttatttttttgcttttttttaaaaaaggtcttgcgttatcttctcactttggtatactagtatctgttcggctatggaggattacccaagtggcttaaggggacggttttgaaaaccgttaggcggttctgccgcgcgtgggttcaaatcccacatcctcctctagtttggtccattggagcagtggtttatctcgcctccctgtcacggaggagatcatgggttcaaatcccatatggaccgttgatggcggaattggtgaaggggttaacacactggtttgtggatccagcatgcgtgggttcgattcccacattccgccccataatggaggattagctcagctgggagagcatctgccttacaagcaggaggtcacaggttcgagccctgtatcctccatatttttttactcaaaagcgttagaaatttttgtctaacgctttttacataccatagaaagaagttaagcatgaataaaaaacagattacaatggtgacggcagccttgatgcttggcaacgtgatgtcggggctagacggaactattattaataccgctattccagccatcgtcgcggccttgcacggaattcaattcatgggttggattgtggcaattttcttattaggaatgtcgatttcgattccgatttggaccaagatcggagagaaaatcactaacaaacgagcctttgagctttcattgctactctttgttttgggatcggctctacaagggatagcgccaaatattattttctttctgtgctctcgctttatcatgggaatcggtgcaggtggtatgggttctttaccttatatcattgctggttatgtgtttaaaaatattaaaacgagaaccaaagtattaggctatttaactgccagctggaatggggctgcgatcttagggccacttgttggtggttggttaattgatgctttctcttggcactgggtcttctatatcaatattccaattggcttaattgcatttttgatttgtttaatttactacaaaccggttactccaaaaaagacaccggttttcgatatccctggtgctactttattagtaatcggactgcttttattcttgatgggcgtgcaactagttggtttaaccgctagctggatcataattggattgattataattagtttagtcttcatcgtctttttctttattcgcgaaggtcatgcagacaatccaattattccaatttctttatttaaaaataaagatttagatggcgactttttattatttgcctttacttggggtgcctttttagcagtaaacacctatatgccaatgtgggctcaggcattactaggcttgtcagctttaattggtgggatgacgttaattccaaattcgattgttgaaattatcgcatctcaaagtgtagcagcgattcaggagcatatgacaacctttaaattagttttgattggaatagttgccatgattatctcatcagctggtttgtttatttctggcatacatacgcctgtgcagatgttgacctttattggtgcattttctggcattggggttggctttatctttgttgctttgcaattaaaggtacaacttgatgcgggactaaagaatatggcaacggccacttcaacttcatatttgatcagaattttagctcaaacagtaatggctgctgtttatggcgtaattatgaatctgaactgggccagcggagttcaaacgcacaagggaatcacgatgaccatgatgaataaattgagtgatgcgcaaagtgccaagagtttgccgcaaaacttagtgccaacaatgagaactattttccacggcggtattaaggaaattatgttggtttcattgattttgttaattatcgcctttgtaatgaatttctactttaactttggtaaaaaatgcaagaaattgtaataattttgaaaataaaagctcgatttgtgagctcttcttttttagttacagcataatgtgtttttcggcataagtgattaaatcagtcaagctggtctgataattttgcttaacccaccagactaacagcatatagattccaccagattgataggctattgcatagtcgggtaggtggacatcagaatggtaaactgacatcagctttttcaaatatttagtttgaaaattaagtaattctccttcaaatcctgcatcaagcagtaatttcattagttgaggattatctttgaagaattcaaggtaggcagtaagctgctgcttaaaagttctcaaattatgttgatcaatatcagcgataaaattatggtattgattaaataaaaattgcgcaatgacttcatctttttggtcataattgcgataaaaggaagtacgagataccttagccttacgggtgatttctgcaatagagatctccgtataaggctttttttgtagtaatttgaataatgcatgttcaatttgttgctgcgtatgcagactcttcatattcatcaagatcatccccaaatgtaaaatgtttgacaactgataccgcttacattattttataagcataaatagttacaagtgtaacgattattgaaagaagtgtcaattatgcattatagtaatggcaattatgaagcctttgttaaggctgataaacctaaagatgttgatcaaaaatctgcttatattgttggtagtggcttggctgcattagctactgctgtctttttaattcgtgatggccaaatgaagggcaagaaaattcacatttttgaagaattaggtctgcctggtggctcaatggatgggatctataataaagaaaaggaaagttacatcattcgtggcggtcgtgaaatggagccgcactttgaatgtttgtgggatttatttagatcaatcccttcgcctgaccatgaaggtgaatctattttggattccttctatcgtttaaatagaaaagatccaagttatgctaaaactagagtaattgtaaatcgtggtcaagctttgccgactgatgggcaacttcttttgacaccaaaggcagtgaaggaaattgttgatctttgtttaactcccgaaaaagacttgcaaaataagaagattaatgaagtcttcactaaggaattctttgaatctaacttctggttatattggtcaacaatgtttgcttttgaaccatgggcaagtgcgatggagatgcgccgctacttgatgcgctttgtacagcatgtagcaaccttgaagaatctttcatcattgcgttttaccaagtataaccaatatgaatcattgattttgccgctggtcaagtatttaaaggatcgtggtgtaatcttccactataatacggtggttgataatatctttgttaaccgctctgacggcgaaaaggttgctaaacaaattattttaaccgaagatggcgaaaagaagaccattgacttaacaccaaatgacttagtcttcgttactaatggttcaattactgagagtactacctatggagatcaactgcatcacgctccagcagaacatgaattgggtgcaagctggcgattgtggaagaacttagcagctcaagatgaagactttggccatcctgatgtcttttgcaaggatattccaaaggctaactggcggatgtcttcaactattacctttaagaatgatgatgttgtgccatttattgaagctgttaataaaaaggatccacacagtggctcaatcgtaactagtggaccaactactattaaggattctaattggctattaggttactcaatcagccgtcagccacactttaaggcgcaaaaaccaaatgaattaattgtttggttatatggtttattctctgataccaagggtaattatgtggaaaagacgatgcctgattgtaatgggcttgaaatgtgtgaagagtggctctatcacatgggtgtgccggaagaaagaattcctgaaatagctgccgcagctacaacaattccggttcacatgccatatattacttcttactttatgccaagagctttaggcgaccgcccaaaggttgttccagatcattctaagaacttagcctttattggtaactttgccgaaactccaagagacactgtctttacgacagagtattcagttcggacggcaatggaagctgtctacactttgcttaatattgaccgcggtgtaccagaagtcttcgcttccgcatttgatgtcagaatgttgatgaatgcgatgtattacctgaatgaccagaagaagttggctgatcttgatttgccaatgcctgaaaagtttgcgattaaagggatgcttaagaaggttaagggcacttatatcgaagaattgatgaagaaatataagttgatgtagttaacgattatttatgaaaaaagaaagtttgttagattgacagactttctttttatttaaatttagtggtaagcctttgagtaaattcaaattaaattaaaactcatctcagaagttttaagagattgaaactaatttgaattatatgctaaaattgacgtgaaaattaaactaatttgaattacattaacttgaaaggattaaaaatgcttccgcggcctaaatacattgataaattgaataaactacgtgataaacaaataattaaagttttaacaggagtacgtcggtctggtaagtccacgattttaaaactatatcaggaacaattacttaaagcaggtgttaagcaggaacaaattcaagttttaaattttgaagatttagggcttgctacaattactgattatttaaaattgtatcaatatattgatcaacgattgattccagataaaatgaattatattttcttagatgaaattcaagacatccctcatttcgaaaaagctattgatagcctttttatcaagcaaaatgttgatctttatgtcactggatcgaatgcttttatgctttcaggtgaattagcaaccttattggctggtaggtatattgaaatccctgtatatcccttttcttttaaagaatttttagcctcagttcctgagttatcccatcaagaagcttttaatcgttatttagagcgaggaggattcccttttgctactgaattagaggatgaaaatacctatctgtcttatattcaaggaattattaacactgtcttggttaaggatatcttagctagaatgcaacgaggaaatactaccttgttggaacatattgcagcttttttgaccgatactaatggcaatttaattactccaactaaggtagcgaatgtgctatcgaataatggcgttaaagcgacaagcgcaacagtgatggcgtatatagaaaaattggtagattcatatttattttatcgctgtgatcgttatgatattgctggtaaaaagtatttacaaattaacaataagtattatatggtagatccttcattaagaagagcgttgttggggcaaaagcgtcctaatatggggaacagattagagggcataatctatcttgaattaatcagacgtggctatgaagtgtatgtgggaaatttaggaaaaaaggaagtagactttgttgctattcgcgatggtattcgggaatactatcaagttagtttaacggttcagaatgaaaaaacttatcaaagagaaatagcaccttttttagagattaaggataactaccctaagatattacttaccgaagatccgggaagttatgatgataatggaattagccaagttaatgtcattgactggttactaaaataaataatattaatgcatacttaaattttgaatggaagataagtattatgtcaaaaagcgagactgtaaaatagtttgtgtaaggatgaatgattccttaaatttatttctttaaacattagaaaaaggagttcctttcttgtatgattggtttgaacaaaaaaacacatacagaaagaagaactccttcatgaatgattttaccaaagattttgctcaagctctattcaatccagacaaaataaatgatttattgcgcaaagagctacaacaggctgttaataacttgctagaagctgagttgactgcctttctaggctatgatccctatgccagaaatggctggaatactggcaattctagaaatggtgcttatttccgcaaggttgatacccagtttggaccaattgaagtgcaagtgcctcgagaccgcaacggtcagtttcatcagcacacgctgcctgactacaagcagcactctgatgttttggaaagcacgattatcaagctctactccaaaggcgtaactaccagagaaatcgctgacttgattgagaaaatgtatggcagtcattatagtccagctcaagtatcaaatatttccaagcagatgctccccaaggttgaggcttatcacaagcgcaagctaagcgacaagtttttctgtgtctatttggatgcgacataccttcctttgcgccgagaaacgtttgagcgtgaagcagtatatattgccattggcattaaacctaatggacataaggaagtcattgactactgcattgctcctagtgagaacattgaagtctggacagagatgcttcaaaacatgaagtccagaggcttgaagcaagttgaactctttctttctgatggtgttgttggcatgaaaacagccttggccaggacttatcctaaagctcattttcaacgctgcctggttcatgtcatgcgcaatatctgtgctaaagtccgggtggatgaccgcgaaaagatcatgaacgaattcaagcagatacatcaacagacaagccaaaaagaagctgcagctgtcttgcacaaattctatgccagatggaataaagcttatagcaatgtcatcaaaggtttgaaggaaattgagcccgatctgctggtcttctacaattatcccaaacaaatcagagcttcaatttattcaaccaatatgattgaatcctttaacaacgtcatcaagcgtaaagctaagcctaaggcagaatttccaactgaacagtcgcttgatgcatttattggcatccaggcaatgagctacaatgaccgctatttcaaccgaattcataaaggctttggtcaggttcaggataccttagaatcttattttgaataaataattaaaaaatcaatttgcgagaaagaactatttacacaaaagatttgacagtttccaaaaagctaaaaagttttgtataataatattattcagagttattaacaatcaatttttaattagaaaagaaggatactattttagactctaaacccgcccgatggggcacaaaagcatatcgtgacgctaagaagttatatatgaaggcttttccagcttgggaaagattctccatgttttctcttttagcaatgtcattacaccgaaatgttaagtttcacgcaatttataatgatggtcagttttgcggcattacttattatgctgagaatgataatacagtctatttgacctatttagccattaatgaaaaattgcgaggacaaggttatggttccaagatcttgatgatgttagaggatcgattccctgataagcaaattgtcattgatattgagccagttaccaagaaggcgaaaaattataagcagcgtgttagtcgcctgaaattctatgaaagaaatggatttcacaggactgaccgcaaattggttgatcctgatggtgaatttgaagctttgactaccggtaaaaagctagacattgatagttttactagaatgttgaagcagatgagctttggattttatcaagcaaaagttgaaaaataaaagaagcctaactggcaattccgttgagggatgctggttaggcttttcttgagtgcttaattttaagaaataatatctatgtttcacgaaataaagtcgaatttcatgggctatgttaaaataaaattaaatagcaataattaactagaaaacgagaagaaatatgaaagactatgtaattttaaataatggtgtcaaaatgccacgcttgggctttggcgtttatcaaattgatgatttagctcaaactcaacaagttgtagaaaacggcttggaagtaggttatcgacttgtggatactgcgcaaatttatggcaatgaacaggcagttggggatgcacttgtgcatagcagcattccacgggaggatattttcgtcacttccaagatctgggtcgataagtatggctatgatcataccttgcaagcttttgatgattcaatgaaaaagttgcagttagattatatcgacttgtatctgattcataagccatataacgattactatggcacttggcgagcattagaacgtttatataaagagggacgcattcgggcaattggtgtaagtagtttttggaatgaacgcttagctgatttgattacttttaatgatgtaaagccggctgtgaaccagattgagactaatgtctggaatcaagaatggaaatcacagcaatatatggaaaaagagggcgtgcaacctgaagcctgggcaccatttgcagaaggagccaaccacattttcactaatcctgtcttgcaaaagattgcagaaaagcatcataagactactgctcaagtgatgctgagatggtttttgcaaagaaattatgtagtaattcctaagtcagttcataaggctagattagcagaaaactttgatgtgtttgactttgaactagatgatgaggatatggcattgatcaagactttggatcaaggctacagtgttttagaagatgagatggatccggaaattgcggaaagttttaggtaataggcattaaaaatgtgttcaacctcataattagatataattaagaataagaaagtgatttcaaaatacgaggtgatccctatgaaaaagatgagattaatcggcacaattatcggtgttgctggagctattggtgcagtagcggcgattgtttataaaaaattcaaagaaaaacaggcaatggtgaatacgccgcaggagaaaactttacttttaggcaatacttctagtaaagccaaaagtgagttaatgaaggcagaattgtctgagaaggatcaagttgagacaaataacaccgaaattccgcatgtttcacttgatgacgataagcctagaatatttgaagataaataagatgaaaaagctcaatctgcatgaattttgtaggttgagctttttgaatgatctatttgagtaaattatcttcaagatgtttaaggtgcttaacgcgatttagataatcattgtttttctgtaaattgtagatatattttttgccaattttctcattggatagtaaatgcttctctactaatgaatttacatattttctaatcgtggtttgtttaccaaaatgattctgcggatctttaacaatatcatttattgaaaaattaggatttctgctagcaaaagacataataaatttctctggttcagttaatttttcctgattatcaattgcaaaagtcttaaaaatacgaatgcgagtagtattgatttcataatcaatgttaatttcaggatcatttaaattattttgcaacacagtattaagaattcttggaccaccgctagctgcagtttcagagacaccaattcgtctgaataaactagcgatttcagtatttctaatggaggaatattgtccacgtaaaaacgattctttacttacgcgcatagtaccagggtttgtaaattcaaagtaactaggtctatctacaatttttacacctaccataccatcataatatgaatgcattaaacaattgactagggcttccttagctgcgatgattagatcgttgtgataggacgttctactaaggtcattaccttgaataaatggatcaggtatatttgtacgcgtggtgctagttaaatctttctagacaataagccaaattataagctaaaattgcaatttccaaccggctttgaaagcctatcagactacgtgctcgattgttctcggcattgtaataggtcagaagcgaaaagtcgctttcaattgttctgcgaatagccatcaattgatgatcattgtgctttttagctcctgtcatatttttacgatatggtgtccaaagttcataacccatttgttttagctgttgatgcagttctttgcctaaatagccttcgtcgccaagaagatagtaattagatggatgggcattttccagcagttcaactgtctccttggcatcatgaactgatgcttttgttacgacataatcaagaatgtaaccgtcatcgctaacaatggcatgaactttgaaaccatagaagtaaattttcttggtggccttataaccaatgttggcataaccgcgaaaaattttagcacgatagttgcgaattggttggcaaacaggtaccggaaagctgtcaatgatcaagaaatgtccattcaggtcaacctttttattcatttcttgccgtatctgataaatcaattgcaatagctgacgtgaacgccgattaaaacgtgagtgtgataaacaattgaaacattcacagaatcttctttgtgattcaattcctgtcttagcttgccagataagtaaagccaaaatcagactgtccgtagttttaatttgatcaatatttcgccgatgagtaaactcagccggtgcatacaaacgataccagtgccgacaaattatcactaaatctttaaaactaacttgtaaatggtggctaaaacgcttaagcttaagacagttcaatcagatcagactcttttctattattactatttacaagtcgagtctaacaagattggacttttttattaactaaaacgatttaactagcaccatgcgtatatttgtttctattttagctaaaactaaattataaaaagaaaagatatttaaagtgggataattcatgtcacctgcagaaactctatcattccagttggtagaattatcgctattatattgttgatagtctaattgaaaacgtgggaaacgatctgttatcgaaatatattttccaaagaaaaggagaccaccatctgtaagatgatattcatttgaattacttaatcgatcttttctgaaaacaccaattgaatataagaattcttgatcactaagttgagaattagtattaataatacctttttcttcaattattttgcgatattctttgatactttctgcatctagatcttctattgtataggtcgaaggtagtaagtgagtatcaatctcgctttgactttcaactgtaaaatatttaagttgctctttagtagctactcgatctctgtcaccagttctaatatatgctttaccgaatgcagttattggacgagtattaaagggttctggatgaattattacttgaataatagttttattttgaaaaaaagaaatctgaacatcattattttggattacaggtcgattaaggcatgaaatattgttattatcattgaaaatttgtgtttcaatgtcttcaacattgtctacaccagttatactaaattcatgtttattcttatcttctgctatgcctaatactattattccgaaactgtcaaatcttttgtgtaaatagttctttctcgtaaattgattttttaattatttatttaatcaaagtaggattctaaggtgtcctgaacctgaccaaagcctttatgaattcgattgaaataacggtcattgtagctcattgcctgaataccaataaaagcatcaagcgactgttcagttggaaactctgccttaggcttagctttgcgcttgatcacattgttaaatgattcaatcatgttagtcgaataaattgaagctctgatctgcttgggatagttataaaagaccagcagatctggttctatgtctttcaagcttctgataacatggctgtaaaccttgccccatttggtatagaagtcatgcaggacagctgtggcttcttctttgtttgtctgttgatgcacctgtttgaattcgttcatgatcttttcacgatcgtcgacgcgtactttagcgcagatattgcgcatgacatgaaccaaacagcgttgaaaatgagctttaggataagtcctggccaaggctgttttcatgccaacaacaccatcagaaagaaagagttcaacttgcttcaagcctctggacttcatgttttgaagcatctctgtccagacttcaatgttctcactaggagcaatgcagtagtcaatgacttccttatgtccattaggtttaatgccaatggcaatatagactgcttcacgctcaaacgtttctcggcgcaaaggaaggtatgtcgcatccaaatagacgcagaaaaacttgtcgcttagcttgcgtttgtggtaagcctcaacctttggaatcatctgcttggaaatatttgatacctgagctggactgtaatggctgccatacatcttttcaattagatcggctatttccctggtggtcacgcccttggagtaaagcttgataatcatgctttccaagatatccgagtgctgcttgtagtcaggcagcgtgtgctgatgaaattgaccgttgcgatcccgaggcacttgcacttcaattgggccaaattgcgtatcaactttgcggaaataagcaccatttctagagttgccagtattccagccatttctggcatagggatcatagcccagaaaggcagtcaattcagcttctagcaagttattaacagcctgttgtagtactttgcgcaataaatcatttattttgtctggattgaatagagcttgagcaaaatctttggtaaaatcattcatgaaggagttcttctttctgtatgtgttttttttgttcaaaccaatcatacgagaaaggaactcctttttctaatgtttaaagaaataaatttaaggaatcattcatccttacacaaactattttacagtctcattattccacctgaagtattagcaaaagagctaacagtttcccaaaatgatttaggtaatttccaactagcttctttgtattcgatgttttcattttcagatggtgttttaaaattaccagtttgtgtaattgctttgaagtttaaaaagtccatttaatgtcacctcatgacttaaatttatttgtgtcaataaattatatactattgctctcgcaacttacactaactttcgccaactttcgcgtaacttacaacattgcgtgcgcaaagtgagagcaaagtttttactaaagtagctcgaagccttgatatatagggctttgttagcttcttaagcttttacaattaacttacactaacttttgccaactttcgcacaacttacaacattgtgtgcgcaaagtgagagtaaaaaataaacccgttagctatcattgcgataactaacgggttttaaatggcttattctatctattggtaaattttaccttcttgtttttctttcttaatcttttcttcttgagccttttcactagctgctttcttaggcaaaatccagtttaaaagcattccgataatggtggaaagggcaactgaggtaagttggaaattgcccagttgtaggtaagcaccaccgataccgataaccaaaatgactgaagcaattaacatattacgcttttcaccaaagtcaatttgatcatcaactaagatcttcaaaccgttagatgcgatcgtaccaaagagtaagaaggagatcccaccgataactggcattggaattgattcgatcaatgcggcaagcttaccgacaaaactgaagataatggccgaaacagcggcaccagctaatacccaaactgagtaaactttagtcatagctaacacaccgatgttttcaccgtatgaagtggtaggaggaccaccaatgaaaccggcgataatcgttgaaagaccgtcacccatcatcgttctgtgtaagccaggattcttgaagaagtcacgcttagttaatgaattcaataccataatgtggcccatgtgctccgtcattgtaacgaaagcaattggtgccatggctaaaatagcggcaggataccatttgaagtggtaactgattccaggcacatcaagtgctggcaatgtgaaccaagctgctttttccacgccagagaaatcaacaattccgaggcagcaggataagatatagccacagataattcctagcataattgaaaccaaactggtgaagcctttgaagcacatttggaaaactaaggtcatgaccaaagtgaagatagctacaccgaagtaagtcaaatcatacttagaattattcatcatagcgtcattagcggcagtagttgctaatgacaaaccaataacgatgatgattggtccaactacgattggtggtaaaactttgttaacccagcctgaaccaattttgctaatgatgatcgcaacaactacgtaaactaaaccagaagcgatcgcaccctgggcaactgccgggtagccatcagccttcattaaggcttgcattgtagcaacgaaggcaaaacttgatccgaggtatgctgggattttgaagtgggtcaagagcatgtggaccaaggtaccgattcctgatgaaagtagagcgatgcttgggttaattccaattaaaattggcactaaaacggtagaaccaaacatagcaaacatatgctgtaaggatagcagtacgccttggccaaattcaggcttttcataaacgtctaagatagcctcagggtttctgtacttttcttttttattcatttaaaactcctatttaacgatttcaatactgtctttctcatcgacttcggtcattgagacttggactttttcattcattgcggtaggaatatttttaccgataaaatcaggacgaactggtaattcgcggtgaccacgatctactagaacagccaaattaatttttgcaggccggccttgatccattaacgcatcaagggcagctctaattgtccgacctgtgaaaagaacgtcgtcaactaagataacgtttttatcggtgatatcgaagtcaagttgttggctgtggatcatcttttccttctcagcctctggtaaatcatcgcgatattgtgaaatatcaattgcccctacagggacttcaacatcttccaagtttttcaaatttttggcgattcgctcagccaagtaccaaccgcgagttttaattccgactaatacaagatctttagtacctttattgcgttcgacaatttcgtaggtcattcgcatcaaggcgcgtttcatgcttaaagcatcgattatttcttttgccatagcttttcctttctggatgaccaaaagaaaaagaccaccaagagcgcatggctcaagatggtccttctgtattagctaacgacaaaaagtattagcttgtgcagatttccttcttagcctcacgggactaactttaaaggtcatcactattattttctttatatttaactcggaaaaacacagattgtcaagatttagtggaaaaatattgtgctttattttgctagttaaatcttgcatactatgagtaatagtagtttttagagttaaaaaggtgggattaaatgactaagaagcaaatatcaatggttactttgtctttgttgctggctaatattatgtcagggctagatgcgacaattattaatacggcgattccagcaattgtgtccgatctacacggaattcagtatatggggtggattgttgcctgttttttactgggaatgtcggtctcagtgccaatttggagtaaaattggtgaaagaatgggtaacaaatttgccttcgaactgtcactagccttatttattttaggttcagttttagaaggagtggctcccgatatttactttttccttgtttctcgagtactgatgggtgtcggtgctggtggaatgggttctcttccttatgtgattgttggttatatttatccgaatattaaacgtagaactgtcatcttgagttatattgcagctagtttttcggccgcttgtattgctggtccactagttggtggctggattgttgatgctttgtcctggcactgggtcttttatatcaatgttccattaggattggtatcaattatcttgagttttcttttttatcgtggcattcgtaagccaaacatcaatactgtctttgaccgactaggtgcttttaccctaattggcggtttgacttgctttttgattggaattcagatgttaggactagctagtaattttctagtggctattttcgtgattatcgggatcgtaatgcttgtctggttcatcttagttgagaaaaaagctgctagtcctatcgtgccattatcggtttttactaataaagctttagttggtgacttcattctttttgcctttgcctggggtgcatatattgcagttaacacttatttgccgatgtggtcgcaggcaatcttagggacaacggccttaatcggtgggatgacgttgattcctaactcaatctttgatattgctggttcacaaagtacgccgcatttactcagacattttaataattatcatttgttaattttcgattttacattgattgcaataacagtaatcggtttaattattgtaccaattagtacgccatatcagattttgatgtcgattgcagcgttatctggtttaggtgtaggctcaatcttcgttattcttcaaataaaagtgcagattgacgctggtgaaaaggatatggcacctgctacatcgcttagttttttgattagaattttagcgcaaactattatggctgccgtttatggggtgattatgaatttagctctagcacgtggaattgctggacaccacaatattacgatgaccatgatgaataagttgagtgacgcagaatctgcgaagagtttgcctaaggcgttaatgccaacaatgcggacaatttttcataccggaattagagaaattatgattgtatcgttgttgctaattatttgtgggtatgttgcaaactttatttataatcatcatgaagcaaagaaagctgcggaatagaaaagtgtctgggaaaaaactagcttccagatgaataaaaacgatcaagatttccttttttaagaatcttgatcgtttttttgttctctttaaaatttttaacaataaaaatcggcccttcagccaccttctttgacaatatttgttcaaattcatcatcataaaggcaattccgatatcggtttcgaccttctctttacctcgcaggtgcgttctgcgcatgccaaatacgttcttcaaatgtccgaaaactggctctacatcatattttctcatgccatagatgtgtctgccttcttcgctttggagaacttcttttgctttttcttttaaatattgccagttaggattatagcgaacttggcgctggcggccgctagctgttttagccaattgttccaattctggcgttagctggaactcgtctgcctcataaaccttaaaatcacggacctgaccagtagaacgatccttgcgctggctgtaatatttgaaattgaatctgacgccatgatgatcaatgtaataatcatctttttcattgtagtaccagttgattagcttagttggatcattcttatactttttggtctgttctttttcatacatagtgtagggaataaagtacttcttgtctggatatttttcctccagcatcgaataattgtattcactgccatagccagcatcggcgacgattttgtcaaacttgtccaacacggtcatttgatccaaaaccggctccaaagttttgaaatctgtcggattaggaaagatggcataatcaactacatattgatcggtcgtgactgcttgaatattgtagccaggctttaattgaccatttttcatgtggtcttccttcatatgcataaaggtggcgtcatgatctgttttggaataactgttgcgtccggcaaagatctcttcggcttcttcatatttttgcattcttggcacataatcttttcttagccggtgcagaatcttttttagtccacgtcgcttggcttttcgaggtgaaccgccaggaatggctttgttttcctgctcaatctctttagtcagcttgttaatttctgcttcagtttcttgagctaattcctttagcccctgactagtttgaactttttctttttccatttctttgactacttctttagtaatcaattcatcataaagttcaactgcctggcctttcagcttttcatgatacttttcaaccgctttgcgccagacaaatgtatagcggttagcatcagcttcaatcttagtaccatcgataaaagcagcaccttcattgattaagccttcatcttctaacaggttagtgaagtagataaagctctttttaatcagttcattggcatggctgcttgatctaaaattattgatagtatgatatgaaatcttttgctggtcagccaagatcatcattggcagattttcttccagcatcaactcaatctttctgccagaaaaaactcttctggagtaagcaaaaagcagtattttgagcatcatggctggatgataggctgggcggcccgttttagcagtcttgcctactaaaacatcttctggaattgaatctacaaaccagctgatgacattagccaaatgattggccggaatggcaaaatctagattaagtgttaaagcagtttgacctgtgatataattcttgtacatgttagtttccaccttttttattttgtgatgatttaataatatcaaggctggagctaaaagtatacaaaaagagcgttgaaacaaaaattcaacgttcttttttcatgatctgagacttagttttttcccagacactttttactgcaaatttttaatcacattaaatctaaacaaaatcaaattgaagacaacaatcccagcagtaacgataaagacagtgctgtaattagttaatcctgagatagttgaacccagcagaggcccgaaaatattaccgatgtacatagcagactggttccaagagaaaattcggcccgtgatttttgctggcgtatttttagtaagcaaagtctgcacttgagggaacaagcaagcatcagtaaagccgactaaaaagcgtaaaataccaagttcaacagtattttgtacaaaagcagtcaaaaagaagaggattgtggctccaataaagccagcaataataattttatgagttccaattcggtcaccgagtgcaccgaagcgcgatgccgcaaggaatgtagcaattcctggcaaagcagctattaccccggaaataaagacgacattaccgtggttagccatcaattgtttaacatagagtgaaacgatcgggttaatcgaattatttgcagcttgaataattagagtagttaaaagcaagccaaagattaattgcggtgagcgtaattctttaattactccgcttgctttatcaagtttcttttcagttactggcttgaagtctgtttcatggacaaagaacaatgacaaaagaaatgcaattaataatagaccacctgtaataaagaaggtaacgcgataggagaaaatagacgctaaggctccaccaataaatggcccgagtaagttgccagcagtaaagctagacgccatagtgccaagtgcttgtccagatttttccttcggagtttcagtcgcaactagagcattggaattagaaacaaagcctgcaaaaataccttgtaacattcttaaaataaataattcctgaattgtcaaattaagtgcaacagttaggttatgaagagatatattgcttgaagagttcctctgctgtgtgatattggaggattcggcgatatttgtggttaatggcatcagttgcctgttgaacataagcttttgacttgtctttcatgctcttgctcttagggaagaattgacgcaaaagaccattgcagttctcattggtgcccctttcccatggagaatatgggtgagcaaagtaaatctggcagcccttgatcttggtcatatccgcaaactcagagccattgtcaaacgtgattgatttaaaccaggcaggatgtctgtcaatctccttttgaagcagcctttggcatgtgcttgcccgatagtcaggaatcttgataactacttcaaagcgtgtggttctttcagtcaaagtcattaaagcaggctgattcttgcgtctgacgcctttaaccagatctccttcccagtgcagcggagcttttctgtcttcaatctctttaggacgctgttcaatggaattgccaagatgcttcttgtgcaaagcgtgaccgccatggctgtgatgacgcttgttcctgcgtcttttgagcttcataggcagatcaatattgcttatgtccagcaagccctgatcaatatagcgatagacggttggtgtgctgggacaagggtagcctggcatagtccttttgaattcaccaacgaactcatcgatgctggtggcatcaaatttagctttaaagcgtctggagagcattctcaaaaagacagcataatgcttcaatggattgcgctgatagcagtttttgcgacgcttctcataataaatctgtgcagtatcagcgtaatagtgctcatacaataaatagctgctgtctctttgcaggacgcttccgcgtttgatttcgcgactgattgtcgacttatggcagccaacttcttgagcgataacagtacgggaagttatgccggaatccagcattgcttgaatttgtccacgttgtacgctggttaattgatgatagtgcttagaaatgctagaatttgaattggtcatgaagatcttcctttcttgatttttcgtcacttcaagtttaggtcttcatggcctttttgtttaacacttagtgttgcacttcaattttaaatccggggccgccaagaaagaaaataagggaaatcgaccggtaattcaacttgatgcgcactcagatgctgtaggcttcattacgcaagctgttcgccctaatggtttaattaagtttgttccacttggtggttgggtaaaatataatattccagccttgcgcgttaaagtgcgcaatcgtgatggagaatatatccctggcgttgtagcaactaagccgcctcacttcatgacagcagctgagcgcaatagtgtacctgatgtggcagatatgtcaattgatgttggttcttctagccgtgaggagacaatcaaggactacaagattgatacaggttgccctatctttgttgatgttaaatgcgaatatcatgaaaagtccggtttattcttcggtaaagactttgatgatcgttttggtgctggtgcgatggttgatgtgcttgataatttgaagggtgaagaaactaactttgacgtagtggctgcactttctagtcaagaagaagttggcttgcgtggcgcctatgtaacggctagaaaagttaagccagatctttgtctggtactcgaaagctgtccagctgatgatacttttacgcctgactggctttctcaaactggtctaaaacgtggcccaatgttgcgcgatatggatacgacatttttaccaaatcctaagttccaacaatatgcatgtgatttagctgataaaaataatattccatatactcgttcggttagaaccggtggcggtcaggatggtgctgcaatttactacgaaaatggtgcgccaacaattgtcatcggtattccggtgcgctatgaacattcaccatattgtttcagtagttataaggactttaaggcttcagttgatttagctactgcaattattcgtgatattacccaggaaaagctagatagcttcaaaaagttttaataaattgcttaaaaagatggattctctattataagggaccatcttttttgatatacttaaacataattttatattttaagcgaggtaaagagattgattacagtacgcgtggtgctagttaaatcgttttagttaataaaaaagtccaatcttgttagactcgacttgtaaatagtaataatagaaaagagtctgatctgattgaactgccttaagcttaagcgttttagccaccatttacaagttagttttaaagatttagtgataatttgtcggcactggtatcgtttgtatgcaccggctgagtttactcatcggcgaaatattgatcaaattaaaactacggacagtctgattttggctttacttatctggcaagctaagacaggaattgaatcacaaagaagattctgtgaatgtttcaattgtttatcacactcacgttttaatcggcgttcacgtcagctattgcaattgatttatcagatacggcaagaaatgaataaaaaggttgacctgaatggacagttcttgatcattgacagctttccggtacctgtttgccaaccaattcgaaactatcgtgctaaaatttttcgcggttatgccaacattggttataaggccaccaagaaaatttacttctatggtttcaaagttcatgccattgttagcgatgacggttacattcttgattatgtcgtaacaaaggcatcagttcatgatgccagggagacagttgaactgatagaaaatacccatccatctaattactatcttcttggcgacgaaggctatttaggcaaagaactgcatcaacagctaaaacaaatgggttacgaactttggacaccatatcgtaaaaatatgacaggagctaaaaagcacaatgatcatcaattgatggctattcgcagaacaattgaaagcgacttttcgcttctgacctattacaatgccgagaacaatcgagcacgtagtctgataggctttcaaagccggttggaaattgcaattttagcttataatttggcttattgtctagaacgatttaactagcaccacgcgtattacagtatccgacgttagtttacgatttggtggccgcacactctatgaagacgttaacttaaaatttactccaggcaactgctacggcgtaattggtgccaatggtgccggtaagtcaacttttcttaaattgttagaggggaaactggaaccaacaacaggttcaatttcaattgatcccaatgagcgcatgtccagcttgaaccaggaccactttgctttcgaagacttcactgtcatggacacagtaattcaagggcacaaggaactgtatcaagtaatgaaagaaaaagatgctctttatgccaaacctgactttggtgatgaagatggggttaaggcagctgaattagagagcaagttcgcagaacttgatggttggaatgcggaagcggatgcggctaagctgctgcaatcattagggattcctgaagaagaacatcaaatgatgatgaaggatttacctgaaagcgaaaaagttaaggtcttattggcccaagctttgtttggtaatcctgatattttgctattggacgaaccgactaacggtttggatgttcataccgttgaatggttagaagactttttggctgattaccctaacattgtgattgttgtttcccacgaccgacactttttaaatcaagtatgtactgaaatgtgtgacgttgatcgtggtaagattcagctttatgtgggtaactatgacttttggtatgaatcaagcaagctagctaatgaattagctgctaaccaaaatgctaaaaaagaagaaaagatgaagcaattacaagaatttattgcccgcttttctgccaatgcatctaaatcacgtcaggcaacttctcgaaagaaacaacttgataaaattaccttggacgatattaaaccatcgagtcgtaaatatccatttgtaaagtttgaaatgcaccgtgacttagggaatgatctagttaaggtggagaacgtttcttattcggttgacggtgaaaagattctggataatgtgtctttcatcgtgcgtcctggtgataaggtagcatttttatcgcgtaacgctttagcaacgactgcgctgcttgatatcgttgctggtaaacttaagccagatactggtaccgttacatggggtcaaacaacggcctttaactacatgtcacgcgatttgaacgctaactttaataatgatgaacttacaatcttagattggctacggcaatatgcgactaaggaacaagatgataatactttcttgcgtgggttcttgggtcgaatgctctttagtggagaagaaattgagaagaagatcaaagtactttctggtggggaaaaggttcgttgtcaattgtcacgtatgatgcttgaaccggctaatgtattgatcatggatgatcctactaatcatttagatcttgagtcaatcactgcattaaatgatgcccttgtttcatatccaggttcaattttattcacgtcacatgatcatgaatttattcaaactattgctaaccacattatcgaagttggacctaaaggtattgttagtcgccaagatacaagttatgacgaattcttagataaagaatcaattcaatcggcagtagctaagatatattaataaaagattattgaatttcttgtggttgaaacttagctatttttggttcatgatgtgaggtaaataaagaatgaaaggacttacattatgaaacgaattaaaatgggatgtactactttaagcattccagcgatggcacttggcattatgcgaatgaatcaaaaatcagttccagaggctcaagtggcaattcaagccgcctatgatgctgggatcaacttcattgattctgctgatatttatggcggtggaaaatcagaagagatttttggtcaagcttttagccaaatgcagatcaagcgtgaagagatgtttattcaatctaaaacaggaattgttccaggaaaacgttatgatttttctaaagaacatattttgcatagtgttgatgaaattttggaaagaatgcaactagattatcttgattcattagtacttcaccgaccagatgcattgatggatccagaagaagtagctgaggcttttgatcaactacaggcagcaggtaaggtgcgctttttcggcgtatctaattttgatacggctcaatttaaattgttacaaagttgcttgagccagcgcttgatgttcaatcaattacaatttagcctgaaacatacaggaatgattgactttgggatgcatatgaatatggtagataaaccatcagttgatcgtgatagccaatttcttgattatgcccgtctacacaaagttactgtgcaggcttggtcaccattccagtatggcatgtttgaagggactttcattgataatgatggcttccccaagttgaatcaagagttgcaaaaactggccgataagtatgaggtaggtaaaaatgcgatcgctgcagcttggattttacgtcatcctgcaaatattcaaatgctagttggatcaatgaatccgcaacacattagggattctgctaaaggtgccaagattcgattgactagacaagagtggtacgatttatacttagctgctggtaattatttgccctaaaccgaatattttctaataaaaacaaaaactagcttttaaaagctagttttttgcttataatagataataggactatataaaaggggattaagaaatgaagaaaaaatatggaaaaaatcttatttttgaagattttattcatgatcgggaagtgaagatgtatcattgtgatgcagatgatcccgctcattcagattatactttaaatgtacaagtttttacgctagataatttgccattttcaccattaactggtgatcagcaacacatcttttttgactatgcaaaagctggaactgatgcagttaagattacaggtattgaaggttatttttacaatgcagttactaaaaggtatgaagtgactgatcatacgtttgtagtaggaaaattgcttaatgacaaggtaaacgaagaagtagctacgcagcaaatgaaggaagctgttgaaaaggtaattgcagaattaagtaaacgtatcccaatgccagctcactttaagcatcccaaaattttaaccgatgtacaaagagcagagaaactaataactgaccgtaatgttaagattactagtttaagtaaagcaactggaatttcaacttatactttgtataactatcgtaagaatcctgcttctttgcgcaaagcttcgcatgcaacggttgattgcttagtaactaagtattttgaaacttactttagccgtaatgagattgaacgctttcggatgatgttaatcagcattgttggggcttatttaaaagaagcagagggcaatccaattgcttatgatcctgctcatgccttgtatacaatgtgtcaaaaaggagattggcatcgtttagctaaaatggaagaattgtggcgtgcaagctacagtgtagaaaagtcgctttaatacaagcgatgtttattcatgcgtttaacggcgtagaagatcggtaagccgataatgacaattccagcaaaaagcaaaacaccagctggatcattaattaattcactgattaaaacaaataaaccgcctaaaatagcaattataggcacaaaaggataaagtggagtactgaaaggacgctctgctttattctttttgcttaggataaaaattccaaagaaggctaaaagatagaagcaataaactgtaaagacgcaaagatctgataagtggtctggatcaaagaaaatcatcattaaaagggctaaaaggacaataaataaagtagccacaacgggtgactttcctttaggagtaacataggctaagtatttagaaaaaggtagatctcctcgtttagccatggcataaacgattctaggaaaggtcagcatttttccatttaatgttcccatcattgaaatgatgatgccaatggaaagaattttacctccgattgcaccgaaaaccgcgttagctagataagtagtagtgttttcgcctagttggtgaatttgattagcggggatgaagcggaaaatcccaattgtaattagggtataaatagccaaaacagctgtaattcctgcaatgattgctcgaggtaataatttttggggatttttcatttcgccgcctaaattagcgattaaaatccaaccgtcgtaaccaaataaagttgctaagacagcaacaccgaagttactagtgtgttggctaacctctgctacagtctggttaatcgcatcttgttgaccccaacagattccacaaatggtgattacagcaatcggaatcattttggcaatcgtggttatgactgaaaagattgcacctaccttattttcgaagaaattcatgattccaattgctaaaactgtgattaaagccaaaggaatgcgccatgaatgattcaaaccaaaaaagttagtcatcatgatgctcataaaaccagcaacggcggcaataattgcaggaccgtacacgatgatctgcatccaaccagccataaagcctaaaatgcggccatagagattttcaatgtagacataaagaccaccagtgtagggcatttgcgccccctatctcggcaatggtgagacctgcagccaaggtaattagaccaccaaaaatccaagctagtaaggccattgtagttgaacctgcactgtcaagaacagaagcctgcttaaaaaagataccagagccgatgatagttccgattacaattgaaaaagctgagccgaaaccaatactgcgtttaagcttgttgtccattttttctcctttatacaaaaatagccggattcaccttatcgtctagaaacgattgagtgaatccggctgctgatttacgtacaccaaaatcactcaagttcagttggaacttgagctagatgagtatgccaatgtggtgtcttgataaatcataattgaatctcctaaattaattttaattagaatatcataattattaaaaatgaacaagaaaaatttgagatttttagtcttcgataatcgtgttctgtgctttgctcatctttttaactaaaaagaaaattggccagccgacagcggtaattccagtaaaaagcaaaacgccagcgggatcattgaagaattggctgactaaaacgaagagcccgcccgcaattgctactaaaggaattaggggataaaacggtacgctgaaaggacgttggtccttatttttgtatcttaaaatgaataagccaaagaatgctaaaacatagaaactataaattgtgaagacgcagagatttgataggtaatcaggatcgaagaaagtcatcataattccagttaaggtaattaagagcatagtggcaatgactggtgcttttcccttaggtgtaacgtatgataaaaatcttgagaaaggcaaatccccgcgcttagccatagcgtaaataatacgaggaaaggtgagcatttctccattgagagtgcctagcattgagataataatgccgacagatagaactttaccgccaattggaccaagaatagcgtcagccaaataagtggttgaatttttacctaatgcatgaattttatcggcagggatgaaactaaaaataccaatagtaattaacgcgtaaattactaatactgtagtgattccaatgatgattgctttgggtaataatttttgtggattcttaatttcgccacctaagttagcaataaagatccaaccgtcataggcaaaaagggcagcgagaacggctacgccaagaccacctgttgatcgattcagctcagtcacagtttgggcgacagcgttttgctcaccccagcagatgccgcagaagataattgcaaaaatagggatcatcttagcaattgtagtgattatagcaaaggctgcaccgactttattttctaaaaagtttaaaccaccgatagcgatgatagtgatcaaaccaatgggaatacgccattcggtgccgatgccaaagagattagtcaccataatacttaaaaaaccggtaactgcagctatcatagcaggaccgtacacaatagcctgcatccaaccagccataaaacctaaaacgcggccgtaaattttttcaatatagacgtaaagtccaccagtataaggcatctgggcaccgatttccgcaatcgttaagccggcggttaatgtgataatcccagctaaaatccatgctaaaagtgccataaaggttgagcctgcgctatctaaaactgaagcttgtttaaagaaaattccagaaccgataatggttccaacgataattgaaagtgcagaacctaagccaatactgcgtttaaggtgattgtccataaaagtcctccagatgtaaaaatatgtataacattatatcatataaggtgacatatagtttctaaagatatagtaaaagattaactgaattcttcttgtttaccactagaattgagtataaaatgaaaaacaaaaatattgttgagtgagaaagggattttatgcgcgttaatgtattacagcatgcacctaatgagggacctggttctattcaagcctggtgccatgctagagataacgaaatgttcgtttaccatccagggaattttggtattttgccaactgttgatgaaacagatctattagtagtcctaggcagtccaaacagtcctaatgatgatcttgattgggtcaaaaatgaacgtgtgttgattagacaaatgttagatcaacacaagccgatcttgggaatttgttttggtagccagcagattgctaaaactttgggctataaggtacttgatgcacccgctaaggaagtaggttgggcaccagtttatttgcaagatcagactattacaggaattccggataagttaacagctcttcattggcatgaacaaatgagtgaaattccaaccgaagctaagttattattctctagtgatctagttaagaatcaaggctttttactgggagataatgtaattgggttgcagttccactttgaaccgcaaattgataatgtacgtgagattgctattaatgatggagcatatgctttagaaaataaggatttacatcaaacgcctacagagattattaatcatggtgtgcctgagaaaaataaagatgtaatgtttactttacttgatttcattgctaaataagcgaaaaggctaggatcaaaattttgatcttagcctttttcttacttcttttctagttctttaatgttcataccaggaatgttgccaaaccattttttaactaggtgattatatgtgccattcttttctagttttgctaatgcagtgttgatatgcttgagcatgtcattttgccccttattaactgcaataccatatggctggttggtaaaggtgccgccaactaatttatagccggaactatcacgcaaaatcccagctaaaattccgttatcagttacaaaggcatctccttgtccagcttttaatgcggcaaaagcttggccgtaatcatcgaattgtaaaatttccgctttaggagcaacttgatggatagcatcggcggcagtagttcctttaactacaagcactttcttgttattcaaatttttagcatttttaatggcgctactgtcagcaaccataattgactgtccagcaggaaagtaagggtgactgaattcgacttgttttttacgttcaggcgtaatggtcattgctgcaatgacggcgtcgacattcgtgttttttagaagctgaatcttggtgttggccgttgttgttatgaaattggctttgacatttttgcctagcatttcatgggttaatgcattagctaaatcaatttcaaagccattaagtttgcctgttttaatatttattgagccgaataatggcgtgtcggctttgacgccccagttaatggttttactagttttaactgcttgataaacgttttgctttttgttttgcttacagccacttaatggcaaagcaaacaggaccactattgaaattattaataaaaactttttacgcatataatccctgccttgttttacttgatgatttttttattataccaatttgaaatttagatgcaaaaattgtttctttactttaattatagtcttatttttgacaaaatgatttgacaatagtccatgtgcatactaatatatttggtatgcatgtagactaaatatggtggtgaagtaatgaaaattagtgagacagaaaaattaaatctatcaattatccatggcagccgtgcttatagccaatgggagcaggatcatgacttgcctgactatttagtggtaatcatgtatgaattactgattcggggaaaattgacacaaagagaattagtaaatctgagtgatttacccaagcagtcgattaacaaaggaattaagattctgcgtgatcatgatcatatcacgatgactgttgatcctagcgataagcgagttcgattttgccagcttaccgaagcagggcggaaatatgcttatgacaggttgcgtcctctatttgagttagaggaaaaaacggctcaagccatgggaactgacaaaatgaaattgttagctaagctttcagaagaatggagcactactttttggcattttttaagtgaagaaaggagtaaaaatggaaaactttaaaataattcttccatacttaaagcgttataaaaaagatgttgtttgtgcaattattgctatcttagtttcagcgttttctggattatatcagcctaaattattggaaaatattcaaaaggcattgatggcgaatcagaagcaagcagtcttgtctgatggaatctggctagtagtcctaggtataattgcaattatttcgggtatttttaacgtttattttgcagcgaaaattgcacaaggagtagttagtgatctacgtgaagatacctatgctaagattcaaacgttctcttttggtaatattaagaaattttcagcaggttctctaactacacggttgatcaacgatatgaaccaggtaatgaacatgatgatgcagctatttatgcagatgttgcggttgccgattttaattgtcggttcatttatcttctgtatcgtgattattccgcgcttctggtgggcaccagtggtcatggttgcacttatttttggttttggcgcttacgttttaagacaaatgaatagtttgtttaccaaattccaagaaatgatggaccgaatttctaatcaagcacaagaaacattgcaaggtgtgagagtggttaagtcatttaatcaaggtccacaagaaattaaaaagtttgatcaaacttcggaccaattgaatgactacaacattgtgattggttactggttctctgcaattatgccagcttttcagatgatcgcttataccgtaattgctttaattgtttatttaattggtaaaaatattacggcacatccaagtgatattgcggtagtcagtccattcgtgaactatgttttaaccctgctatttacgatcatgattgccggaatgaccttaatgcaattttcaagagctaatatttctcttggacgtattcgtgaggtattggagactgaaccagatgtcaagtttgtggaaagtggttcggttgcacctcttagcggtagcgtagagtttgatcatgtttcctttacttatcctgatggggatgatcctactttaaaggatatttcgtttaagattaagccaggtcaaatggttggtatcgttggggcaacaggtgctggtaaatcaactttggcccaattaattgctcgtttatatgatccaactaagggtaaagtaaaaattggcggtcaaaatattaaggatgtaactgaagctgcattacgcaaaactgtttcttttgtgttgcagcgagcagttcttttctcaggtacaatagcatctaatttgcgtcaaggtaatgctcaggctaaattacatgaattgcagcgtgctgccaatatggcgcaagcatcagaatttattgagcgttataacgattctttcgatcatgaagtagaggagcgttctgctaacttttccggtgggcaaaagcaacgtctatctattgcacgtggcttgattgctaaagcaccaattttaattttggacgattcaacttctgctctggatgcggaaagtgagaagaaagtacagcaagctttagagcatgagctgcctgatactactacttttattattgcggaaaagattgtttcagtgattaatgccgatacaattttagtgttagatgacggtaaattagtggcacaaggtacgcatgaagaattgcttaagacttcgctggtttaccaagaaatcttcaagacacaaaaaggtaagaaaggaggaaatgaataaatgagtaatacgaaaaaggcattgcgctattttgctaagtatttgaagccttattggaagggaatcactattgtagttatcctttctctgatttcgagtggtgcacaggttatggcacctacatatttaggccgttcagttactgctttaactacttatttggttgatttaaaaaagggtacagcatccatgaacacgttctatagcgcgttatggtcgatgttcttgttttacttattgagccagatagcgatttttattgcttggatggtaatgtccaagttcaatgcggattcaactaatgacatgcgtgagaatctatttgccaagtttcaacggatgttagtgcgctactttgatactcatcaggatggtaaacttttatcgctacttacttccgattgggataatattttcaacgcaatgaacaatgcgatttttgaaattatttcccagggaattatgttcgtgggaacaattattgtgatgttcacgattaatagtactttggcttggactacgattgcgacaacaccattcattttgattattagtgtccttttaatgaaaaaagctcgcgtttatatcgataagcagcaagatgaaattggcgatttaaatggttatattaccgaacagatcaatggtgaaaaggtgattattaccaatggtttgcgtcaagaatcggttgatggcttcaaggtctacaacaataaagtaagaatcgctttgtttaaggggcaattttattcgggaatcctattcccattgatgaacggattgaacttacttaatttggcaattgtcatcgctatggggtcttggatgattatttccggtcaaatttctcaggctattggattgggcttgattgtaactttcgttgaatattcacaagtttatttccaacctttgacgcaaattacttcaatttattccatgattcaattagctttaactggggcaagaagattagctacagttgaagaacaaaaagatgaaaacgaagtgccaaatggtaaggtcattagtggtttgaatcatggtgtcaagctagaaaatgttcattttggctacaataaagataaagaaattttgcacggagtaaatatttcggttgataagggccaatcagtggctctggtcggaccaaccggttcaggtaaaactacgattatgaacctgttaaatcgcttctatgatgttaattcaggtaaagtaacctttgatgggacagatgtacgtgatattcaactaacatcattgcgaaataatgttgggatcgtcctgcaggactctgtcttatttactggtactgtagcggacaatattcgttatggtaagccgaatgcttcaatggatgaagtgatctcagcggctaagcaggctaatatccatgattttattgagactttgcctgatggttacgatactcaagttagcgatgctagctcaatcttttcaactggacaaaagcaattaatgtcaattgctcggacaattttaacgaatccaccattcctaatcttggatgaagcaacttctaacgtagatacggtaacagaagaaaagattcaaaaggcaatggatactgtgattgctggacgaacaagctttgtgattgctcaccggttaaagacgatcttgaattctaataagattgttgtgttaaaagatggtaatgtgatcgaagaaggcagccacgaggcactgcttaaagaaaagggattttattacaaactttacacagatcaaatggcatttgattaacaatgtgctatacttgacttaattgataaataaatgaaatgtcactaggggtgcgtaatgctgagataatacccttcgaacctgaacaagataatacttgcgcaagggaaagtgctaacaagagaattaacttttatttgtgtgctcctactgacagtatgttagtaaggagcatttttatgtttactagatcgtcaaaatggaatgtaaagtcaattattttagtggctttaattggaataatcatgggcgtgatttacacttatggttttaataatgtgtataacttggtgaaattgagttttttgcccacgggttatgcaccagtagtggataatatttttacaggattatggtacatggcggcaccactagcaatgtattttgtaccgactaagggtgcaggaacaatcggtgaattattggctgcgactgtagaaatggcgatcggcggacaatggggagctttgacaatttttgaaggattaattcagggggcaatgaatgaaattggctttttccctaaaaaggaacgttatgaaagattctcttggaaaagtgtcttgaccggtgccttttttgctaatttgggtggctttattcccagctacttcttatttggttggagtcactatcaaattaatgtccaaattttgatgtttattgtcagcatgatttcatcattagtatttgatggtgtactagtaaaattgattactaatctatttgataaagcattaaagccaaggcttgcctaagtcatataatcaataccttttcgtatacacacactttattaatactatataggtgctaagattaaattagatatttgtatacgttttcataaaaggggaaggggacttatatggctcgacgaagcaatgcggaaaaggaagctgaggatgaggcgattaaaaattggaatccacgttataaacacaatgtcattgtctacttatggatttatggtattttaggtgcagtaacagggattacgaatgatgcagccttgtcttactacaagattgtagcgccacacttgatttcaggtttaaacatttttaatgcggcgacagcaattttgatgtcagtcatgattgcgacggttcataaatggggctatcgaaagattttgctgatcttgccaccaatgacggcaatttttatggccttaacctgtatcacaaccaatcaaattatcatcatgatcgcttatactatttcttggacagcaattggggtttatgatttgatgtatccactgatgtggacttcatatgttccagggaagattagaactaagatgttctcaaccgttatgattgttaacttgattacgcagacaatttgtactttcttaggtgggaaggctgttgtttggttctttggcttaattagagggattccttatcacgaagcttcagttctatcaggtaattctgaaatgttaaccggccaaactttagctgactatacaaattcatacagaattttactttatattacagctgctgtaacgatgttagcctttatcttagccctatttattcacgatgtaccacgtgactatcgttctactgcagatgataaagaacctagcagagttgaaaaggtggccatgtataagaagcttttgagcaagaagacattgatgtggattgtttatattgccggtatccaacttggtgctcgtttagttgccgtttatgtgccaatttatttgaatagttatttgcacattccacgtgatgttacttctaccatcaacacttttgttcaagcagcaatgctaattggttacttctttgctccatttttggaaaagaaactcggtgcaatcgtgtcggttgctgcaggtacattaacttgtgtaccggttatgcttttgttagctaatggtcgccggttaggtagcggagccttcttattcgtcattgtcgcaattctgcttttcttgagaacaggtttagccaatgccacgatgccgattcagcaagaagttcagatggttattgttgacaaggacttgcgtccagcctttactggtgtagttcaaattgcctatgctatcgttggagttattgatggtctcttcactgaattttacttgtttaatacgcaagatggttatgctaatgcttactacattgcagcggttatttatgttattgccagtgttttgcttttggtattctttgctaagaaatataaccgtattttggatgcagctaatgcacaggatgataagaaaaactaagataatttagagtattaaaataggcaagttaggtattattcctagcttgcctgtttgttatatctcgataattattcacttaaaactgattgcaacttagtagttaacatatcgatagccacatcgttttcgccgccttcaggaacgatgatgtcggcgtaacgcttggttggttcaataaattgattgtacattggcttaaccgtgcccaagtattgattaataactgaatcaagtgagcggccgcgttctttcatatcacgttcaagtcgacgaataaaacggatatcatcatcagtatcaacgtaaaccttgatgtccattaaattgcggatatcttcgttaaagagtaccaaaattccttctagaataatgatatcagctggttcgacgtgaatagtttcatcactacgggatgagcagtgaagtcataagttggcatttcaattggctttctgtgcatcaattgatttaattgtgcctcaagtagtggcatatcgaaagcatcaggatgatcgtagttgatcttcattctttcttccattgatacgccagtattgtctttgtagtaagaatcctgcgtcatgatcataattcgatcttgatcatcgatgttatcggcaatttcgtgtgcgattgttgttttcacactaccagaaccaccagcaattccaataataacgggtttttcaagctttcccatatcaaactcctttaattttctaggtatcactaatattctaagctattttccgaatattaacagcatttattttaattaaaaacggatacatttgcgatttaaattattttcccttgcattttcttgaaaaataatgttaaatacatataaataaattaaaaggctatgaaaaagacgagtaggtagtttattcttagcagtgagttggtgttagtgaaaagccagcagaccctgaactattgaaaaacacttttagcagctcaccgaactaacaattcttatagtaggtcgagacgtctccggtacgttaccacgccggtgaagcatgtcggtgcttcatgagttggtctatacttagacaatgtgggtggtaccgcggaaaaaagcctttcgtcccaaactagaggggatgatgggctttttctttatcctgaaagttagtagttaataaattcgtaagtagcgttaatatgattattttaatctagctaaatacaaatatattttgctaaaaccgaacaaatttataagattagcaggctattatactattttgaattgctaaaatatttagttttagctttaagaagagtaaaataattatattgtgtagacaaaggaaagaaaggtagaagccatgacagcaattattgaatttaagcatgttgataagtactatggaaagctccatgcattgaaagatattaacttaaagattgatgaaggccaagtggtttcaattattggtccatctggttcaggtaagagtactttaattagaactatgaatggcttggaaccaattaatagcggtcaattaattgtaactgggtatgatttggctgataaaaagaccgatattaataagattcgtaaaaatgttgggatggtattccaacactttaatctctacaataatcacactgtgttagagaacgttatgctggcgcctaagattgtgctaaagcgtcctgatgatgagaaccgtaaagtagcgatgcaatatcttgaaaaagtaggtatggccgataaaattgactcttatcctcatcaattatctggtggacaaaaacaaagagtagcgattgctagatcattagcaatgcaccctaaggtgattttatttgatgaaccaactagtgcccttgacccagaaatgattgaagatgttttagaagttatgagatatgttgctgaacaaggcattactatggttgtggttacccacgaaatgggttttgctagagaagtaagcaatcgcttaattttctttgataaaggtcatattttagaagatcgcaagccagaagaattctttgctcatccagatactgaacgtgcacgtcaattcttaagcaagatcatttctaaagattaaggtggcacgccatgaaaaaattaaaaagattttttttctttcccttattgctaatcttggcacttgccttgactgcttgtggcaagcatgctagcaataatgtttatcaaaaagtaaaagaaagtaagacaattgtttggggcgttagagcagatactagattgtttggcttaacgaacattaagacaggacatattgaagggtttgaaatcgatttggctaaggctttaactaagcaaatgctaggtaaagatgctaaaaccgattttgttactactactgccaacactagaatcccacttttaaaaaatggaaatgttgatgctgttttagccacaatgactattacaccagaacgtgccaagcaagtaaccttctctaagccatactttccagccggttcatctttgttagtgcctaataatagtaagatcaagaatgttaaggatctggaaggcaaaactgttttggccgttaaaggaactaccgcagttgatgatgtacataagtatgcccctaaagcgcggattttgcaatatgatgactatggtcaagcaatgtctgcattgaaggctaaccaaggtgtggcattaactactgacaacggcttgcttgccggtatcgctcaagaaaatcctggttataagttagtcggcggcgtctatagtaatgctccttacggaattgctgttaataagggacaaaaacaaatggctgatcatatcgaccaagctttgaatgaattacaaaagaatggtacttatgaccgtttgattaaaaagtggtttgctggaattcctggttttagtctaaagggggttttgaaataatgtggcaaattattactaacaactggggcagcttcctaacaggtttttggaatactattttaagtagtattattgctctagttttcagtttgattttaggcgtgatttttgccttgcttgaggtagcaccatctaaatttggccaagtgatcgcgaagatctatattgcgatttttagaaatatacctttgctggtaattgtcatgatcttttatttgatcgttccacgttatattgtgaaattgtcaggatttcaagcggggacaattggtttaacgctttatacatcagcgtttattgcagagactgttcgtgcgggaattaattcaattggaactggtcaaatggaaggtgctcgctccaacggtatgacctatgtgcaagccatgcgttatgtcatcttacctcaagcgatgaagatagtgattccaccactaggcaaccagtttgtcaacttggttaaaaactcttcagttttggcctttgttgccggttttgacttgatgtatcaagcacaattgattgcgttctcaacgttccaaacaattgatacttatattattgttggattgttctacttgatcttgactttgccgcttagttactacatgcgtcatttagagaaaaaattagtcagctaataggaaggggatagagaatggaaacttttattcatgcatattcatgggtcgatattcgcttcttattacaaggactttgggtaacgatttatgtttcattaatttcaattgcattaagcttcgtagtaggattaatcttaggattagttcgctacatgaaaattaagtatgtgtctgcaattgtaggctttattattgatattattcgaaacttgccgctattgttgatcatcttctttacctattttggtttacctcaattaggtattgtaacgaatccaacgacagcttcaattgcagcgttagtcatctttgaaggtgcaatgctagcagaaattgttcgttcaggaattggctcagttgattcgggtcaaatggaaggtgcccgttccaacgggatgtcgtatggtcaggctatgtatcatgtaattatgccacaagctttgcacaatatgattccggcattattatcacaatttgtatcattggttaaggatacttcattggcaactatcattgttttgccagagcttttataccacgcacaaattatttacagtcagaacacgacttacttaattccaatgtatgtgattattgcaatcatgtactttattgtctgtttctgcttgtcaacgattgcaaattacttgcagaaaaaatatgattaaaggctcaaattatccaaaaaaactaactcatgctaacataatagtaagagttagttttttattttaggaaaaattatgagtgtaaatgcacagttaacagatcgtgaacgagttgaattaactaaaaagacatatgatgaattgcagctgggtgatactatcaaaatagatcaacattatcttggaactgtttgtcgtaatgtttatgctaaggatgggatgcgagccttcgtcatttcaagtccgaatgaaataacaatcttatttaaaggatcatatggttttaaaaaggggactccacaaacttggcgtgatgaatggattaaaactaatctaccaattttaaaagcactgcttgcacgaaaacggacgattcctagccaattaaagtcagctgctcacttattgaatcagacaattaatcaatttaaaggtagtagaatttatatttatggtcattcgttaggttcaattaatgctcagtttgctttagctaattgtcgtcatccagaagcaattgcagctgcttatctgtatgaaggaaccaatatttggcttttattaacgccaacagaacgacgtcaggtggctaaaatgcgggagaaaatttttaactatgtcgatatttatgacccggttacgttaggaattactgagacgcaccatatggtaggaaaattgtgttatgtggatagcgaaccgatgcaaccaattaagcagcatatgtggggaggatatcactttaatgcagatggtagtttgaagttacgtaaggttgatcaagcttttctggcagaaagtcgtagtgagcgtaagttacttgctcgttcaggtgatttggcagattttttagagaaaatgggctcagccgaagaagtaaaaaaattagctaccgataaaattgagcaattagttcaacgctatcctgatcataagagtttggcaaaattgaccgctctttttgaaggagaaatacggaaaagtaaaaatcggtaaaagaaaaaagcaaattatgctaatttgctttttcgttagacaatgattatttaaccaatgccttagttttgtatgcatatgcagcagtataaggaccagcaccagtagctattcttaatgccttaacctttttgccgttaacagttctagtaacagggatgtagtattcaccatcaccagctaagttaacccaattgttgacattgaagccctttttatagttagctgcagcataaatattttcagtttttttgatgaactgattacgcttcttagctgaaacgttgtaaacatttttctcgaagaacttttgtgaaggtacgtaaagctttttaccatctacgctatgagcagtgatctttaccttagaaattgttttatcacccttttcgcgataataccaggtgccacgggttgcttttggtgtggtaaaggttttagcaataccatagcctttaggaagcttgctagcataagttggtgtagataccaagaacaataaaccggctaaaaaggatacgaaaagtaaaagtttctttttcatagtagtctccctcatttaataaatgatattttaactacttttattataatggttttacaggaaaaataatataaaaatctataaagaattagattagcattaaaaatttttgtataatattcatatttaagaaataagaaggtaaatatatgacgattgattatagaaaagatattattgatttaatgcaggcgacggggagcgatccccaatcactgaagcagtcaatgattgcgttgaaaattattagtaaaatatataaccaggcagtactaggcaatccacctgagaataagaatgaagtcgttaaaattgcggaaaaagctgatcaggctgtaaaaaatgagccagaaataaaaactgagaataagctagaaaataaaactgaaatagaaactaaaaaagaaaatgatgaaaatactgtagaaaaaataaagccgaaaaaaacgaaggaagagcttgaaaaagaaaaagctaaaaaagaagaagctgctaaagctctgagtcctacggttttaaagaataaaaacaaatatgcgaccataactcctattcctaagcctgtggttaagaaaataattcctgtggctaaaccaaaggaaaaacaatatgagattaggcgtaagctgctaggtgcagaagcagtggatgagaatggtcattcagtacaatattttaatgaacacttgactagaattgaaaagctggaaaacggtgatacagttactttgctagatcacttaaatgacagtggcaatcgtccaattattaaagttgagcatcatgcaaagtcttttgcgccagatgaggaaattatcgaatttggtccagcggtagttcaccgtgattcttttggtttatacatcaagcaggactctaatggcaaaaacctaagtcaagtaaatcctgaaaaagctattttatacttagacatgaatactgtaagtcactttaacttacacgaaaatgacctgattagtattgtttggcgagtcagtgatccatccttcattagggttagatggcgttatgccgaagctgaagttactattccagaaaagaaggaaaagccggataaaaataaagaaacggaaaagcacaagactaaaggtagacacaagtctttattgcatcaattagaaaaaaaggagaagcagtcgtctgaaaagcaaaatgaagactatgcttcccgaattgattttgacctcgataaaaaacgagttaccgttgtagtaggagacaagagcttaacctctaacttggctaaggtgattgaagcacacaatggagtagctcgaattatcgagatgaaacaggcttctaatgttttacgtgcatgtaaggaatcgaattatgtcattctaatccagtcatacattaagcattctatcagtcaaatcctgatcaattcaccacacaagtcatattcgattgcaatggccacaactgcagggcaattagcggtagaaaaggctttatatcgtgctcgttacaagttgaatgtaactgataatgatcaaattcaatatccatttttagtaaataattaggtaaaaaaaagaagttcaattaatactgaacttctttttttgatagatattttatttgaaaaattattgcttccaagcagcatcaagcttatctttaccagtcttgatatcgctattccatgattgctttttacttgccttagctaaaatggtttgcatgttagcattaacttgatcatatgcggcagtagcattcttagttactggtaagaagtaaaggttcttagaggtcttggcaataattgctggtatcttgctgttcttggcagattggtaaaccttgtcgttgatagcagcagtattaactggcatgtagcctgtttgtttagcccagtaaagttgtgatgacttagaagttaagaacttaaggtacttaaacgcagctgacttttgcattgcggttgcttttttgaacatataaatgtcagtaccttgttgtacgttcatcgtgcttggacgagcagctacaccataagtgtaacccttcttaagtccttgcttaaggtaagcttcattggcagttgaaccgatgaacatagcaacgcgaccattgttgaatggagttgacatgtacttttcagtaccagcttgcatgaagtagccggctcttactccattagcgtagtagttgatggctttaacggaatccttggcagcaaagtttaagttcttattgaagtctttgccgtaagtttccttcatttgcatcatgtagtaattgtttaaagcatcaaatccaacaccgcgtactttgtggtgactttcacggtaaatttttgcggatgcagaagccaattcactcatgttagttgggactttaacatcatacttatcaagtaaggtcttattgtagaaaagtacttcaactgacttgttgaaaggaacaccatattgtgtaccgttgatgtttgcaccatcccaaagagctttcttaatgccactcttagcatatgagccccagccaatttcagaattgttaatgtatggggttaggttaacaagcatattgttcttggcagcattgtaaagccagccaggataagcttgagtaattgtcggtaaatcctttggcgattgcaaacctgaaaccaacttagattgtaaatcagagtagttgccgccttggctttgcaacttgatagtaatgttaggatttttcttttcaaaatctttagtcaatttttgcaaactgctttgcgcattaccagttagtgaataccaaaaggtaacggtagtcttcttgttaatcttagttggaatcttcttattagatgaagatgaactagaattattatttgaacatgaactagaattattatttgaacatgcactcaagcctagaacagctaaagctgcggcaccagtaagtaccaattttttatagaatttcatgattcttcctctcatgtatatcatgtatttcttttacaaaggtagtttatcatagatagacgtactattcctagctttattaataaaaatgttcacaattaaccgataaaattgttaaaatgatgttaaatgtatgatatctttggtttagcaggtgaaaaatatggacaagaatcctttagtgtatgaatattcaattggtaagcgtaagccatatgattatgattatggtaatcggcaaggaaatcagaatgctggctgtcctttttgtgatgtgcagcatctaattaatatttatgaaaaagatggcgataagatttggttgaagaataagtaccctacgttaaaggatactaatcaaacaattttaattgaatcaagtgatcaccagggagatatttcaacttatacgcgtgaagataatcaagagttgatgaagtttggcttgaagtgttttcaaaaaatgaataattcaggccgttatcagagtgtgctttggtataaaaattttggtcccaagtctgatggttctttaactcatccacatatgcagatcgtgggcttatatcataaagatggctatcacgatattggcgctgataactttaaaggatttgaagtcgggcgttcgggttcagttgaaatgaacttatcagcgcgtccagttcaaggctaccaagaagtaaatattttgacacatgataatactaatttggatacttgggccgatttgattcaaaagggcacacaatatgtgcgttcagtcttgtcacatggtgttgattcttataacttatttttctatccaattaatgatggtcaaggtacttgttgcaagattattccacgattctatgcttcaccatatttcgttgggtataagatctcgcaagttgacgattcagatacattgaagtgggaagctgagcgcttaaaaggcttcgttaatggtggtattttacagtaagatttcaaaaatgtgtgttcaatattttgaatacgttttttgttataattgaggttgaataaatccatttttagaagaggatgctcataatgaagaagattgtagttattggttcaagtaatgttgatacaacattacatgtaaaagactttcctaagcctggtgaaacaattaatgcgctagacattactactgctggtggcggtaagggtgctaatcaggcaattgcagctgctaaaagtggagctgaaacttactttattaaccgtgtaggtgaagatagtgaaggaaattttatcacgcatcagctcaagagttatggcgtggacacaacttatgtgcaaaccacaatgggagcaaagacaggccatgcttatatcacgttgaatgaagctgggcaaaatgacatcattattgatcacggcgcaaattatgaactgacagtggaagatatccgtgcagctggtgatttgattaagagttgggattgtgtaattgctcaattcgaaatcccactagatgtgacgcttgaagcatttaagattgctaaaaaggccaaaaaaatcactattttaaatccagctcctgcagttgatgagattcctaaagaattactgcaatatactgatatcattacaccgaatgaaactgaaagtgccaagatcactggcattgcaattaaagataattcaacgctggccactaatgcagaaaaactacacatgcttggtgtaaaaaacgtggttattacctatggtgataagggtgcgtatatttcaactcccgatgttgaagaattaataccgacttataaagttgaagcagccgatactactggtgcaggagatacctttattggatatttggtaagcaatttaaattctggcctatctaactttgaagaagcagctaaaattgcaagtcgtgcatcttcaattgccgtacaacgtttaggtgctcagccttcaattccaactgaacaggaagttaaacaggcgatggaggatgatgaataatgaacaagcaagaacaagatcgtttgaaaaaagaagcagcagaaaaagcagctgccatggttaaatcaggtatggtattgggcgttggtacaggttcaaccgttgcctttttcattgatgctttaggtaagcgcaaagatgaagacggcttaaaactgaaggctatcgtaactactagtaaccgtagtaaaaaacaacttgagggcttaggctttaaagttagtgaattggccgatattgatcaagctgatttaactgtagatggtgctgatcgggttaccgataacttggatggaatcaaaggcggcggtggtgcattaactttagaaaaaaatgtagcaatcaattctaagaagatcatttggatcgttgatgaatcaaaattagtgcatcgtttaagcggcttcccattaccagttgaagttttaccaatttcttgtgaacaaaactttaaacgttttgaacaagaaggattaaagcctcggtggcgtatggatggcaatcaacgttatgtgactcactatggaaattatattattgatttggctgcagatcctgttccagcacctcatggtttagctgattaccttgatcatactgttggcgtagttgaacatggcttgttcctggatatgtgtgacgaagtaattattgctcatagtgatggcaccatcgaagataagaaaaagtaaattaagtgactgaaggagatttcatcttcttttttatttttcaaaaagatatatttttattgcaaaaaatctagactttttctatactagtaaaaatttcaatttttaagtgaaatagaggataaaaacttatgaataaaatatctggtaagcaaaaggtgtcttttactggccttttaattgctatcggtattgtctatggtgatattggtactagtcctttgtatgttatgaagtcgattgtgactgaaaatggtgggattagtaatgttaaccgtgaactaattgttggctccatttcgttgattttttggactgttacattattgacaacggtcaaatatgtgataattgccttgaaggcgactaatcatggtgaaggagggatcttctctctttatgcattggttagaaagagggctaaatggctagttatcccagctttaattggtggagcagcattgttagctgatgggacattaactccagctgtgactgttacaacttcaattgaaggattgaaaaatatgcgctttggtgatgtaattccagtttcgtcgcaagatatggttatcttgattactattgttatcctggttttactattttcaattcaaagaatgggaacgagtgtgattggtaaggcctttggtccaatcatgctcctgtggtttacttttttagggctcattggatttatgaacttaagccatgattggagtttgcttgatgcaattaatccaattcatgctttgcgtattttatttagtcctgctaataaagtgggtattttgattttaggttcaattttcttggcaactactggtgctgaggctctttattcagatgtcggacatgtcgggaaaagtaatattatgggctcttggccttatgtgtttgtttgcttgattttaaactatttagggcaaggcgtctggattttacaaaatgctaattatcatgctggtaatggtgatttcaatccattttttgaagcagtaccaagtagtctaagattgtttgctattgctttggctacgattgccgctattattgcttctcaggctttgattacgggttcattcactttagtagctgaagcaagtagtttaaaatttttaccaagaatgaatattatctatccttcaaatgagaagggacagatttatattccttcaattaataagatgatctgtgtcattacagttgcaattgttttcttatttagaacttcacatcatatggaagcagcatatggtctggccatcacggttaccatgttgatgacaactatcttattatttgaatatctgggtaaaaaaggtaccgcgctatcaatacgatgcattttcttagtagtctttgcctttattgaagggatgttcttattctcaagcttaactaagtttttgcatggcggttacgtcactgttttaattgctggttttattttggcaatcatgtacgtgtggttctatggcaataagatccgtgataagcgtgaggagcagaatgcttatgttcgcttagatgaatatacagatatgttgactgagttgagccactgtgatgattatccagtttacgctacgaatgtagtttatatggctaaggttaagtataataaattcattaagcgcgaaatgctttattcaattttggataagagacctaaacgggctaaggcttactggtttgtaactgttaatgttactaacgagccatatactgcagaatacgcggtcaatacttatggtactaagaatgtaattaacgttcagttgtatttaggttttagaaaacaaaccagtgtaaatgtttatttgcggcaaattgttcatgatttgatcgctgatggaacgattgaagctcaaccacaacaattcactactacaccgggtcgtgatgtaggggacttcgcctttgtaattgttaacgacgtaattagtccattaactaaattgacaggctatgaaaagttcatggttgaagcaagagtatggctgcagaatttatcttctaaccctgcatcttggttcggactggagtatgccgatactgtggttgagcgtgtgccattagtattaggtgaccatgaagaagaacacattcaacgtattaaacccaaaaaagaaaaataattattagaataaaaccaaccactttcttaattggttggttttttgctattataaaagtacttaatacgagaggataattttatgaacaagaaacctttaattatcagtactgatcctggcattgatgacattgctgccatgacgattagtctttttgcacaagaacttgatgtgcgcatgattgtgcctacttggggtaacgtggcactgaaatataccttgcaaaataccttaaatttagaaaagtttttgcatactaaggttcctgtcgtagtgggtgctaatcaaccactggtggcaccaatgattagtgctgcttcggttcatggtaaaacagggattgccggctttgaatttgaacaagctgatgattctttaattgaacctggtcttgctgcaacgttgatggctaaggaaattaaaagtagtccagaaaaaataactctgatgggcattggaccattaactgactttgccttactttttaagcaatatcctgaagttaaagaaaatattgcggaaattgtaattatgggtggtaatattggtcacggaaatcatagcccatttgcggaatataatattgcgggagatccggaagcagcgcaggtagtttttcatagtggattgctagttaaggttgctccacttgaaattggaaataaggcccatttaacaccagagcaaatggataaagttaagacatgtggtgaagtgggtaatatgttgtattcacttttctctaacattcatgaaccagacggtgatccgcgaattaagatttatgatccgactgcagttggaattatgcttcatccggaaatgtttacaatgaaaaaggcaaatgtgaatattgaattgcgcgggcaatatacttatggtgccagcgtaatggattttatggaccaagaacatgccaatgcggagattgcgacagatgtggacttggataagtttgcaacttggtttattgatagtattaaaaaggcagatcaaggacgagaataatggcagattatgtttatcggacagttatgcatgacattaaacagaatattttgaataatcagtataaggggatgcgactgcctgatgaacgcagtctagccgaacactatcaggtaagtcgatcatcaatgaagcgtgcgctggagctgttggctcaacaagggatcgtttttaaaaagcgaggtagtggaacttttattaatccactatatttgcgcaaacaggcaatgtttcgttatgatggatcgaatcttggaatcactgattcttttaaagtccctggtaaaaaacaacaaattaagttgcttgattttcatgtgattaaggcaactaaagaaattgcggaagacttatttttaaatgaaaatgattttgtttatgaattcaagcgtctgcgactgttagatgaacaaccatttttaattgagactggatatttgccgattaaaattgtgccggaattaaagccagagactttacaaaagtctttgtttaactatttggaagatgaacagggaaagaccgttactaagtcattcttgaatatcactgttgaaccatcgaatgaagaagatcagcagaagctaaatttgaagccgactgaacctgttggtgtaatggaagggatcttcttcttggatgatgggacgccgtttgaagtatcaaatatgcgcgtgcattatcattatatgaactttaatacctttgttaatttgggtaaataaaaagtagctgtgttttcttaagtcaattagtttaagaaaacttggctacttttttattttgctcattcagacggttttagtttacagtaattattatttctctactttagctaaatatgaatcaagcacctctaaaaccccatcatcattgttactcggggcctcatacttggcgattttcttaacttgatcttctgcattagccatcgcataactgtaaccggctagttttaacatctcagcatcattcattccgtcgccaaaggcaattaattcattgggtttagcaccaaaatagcgtaagaagtattttagagcgctccctttattaacgctgtaaggcacaatatcaagcaaaccgaaaccactagaagtacagtgaatcttctcggcatgggtttggttgaattctttttctaattccgcggaaaaatcatattgataacttaaggtgattttagtaatcatatcctgcggattgatagccgctgctaaatcagtaacttcaattcgatcggggtaatagaagttcatcgtctgcttaaaactaggagaagcattaatagttgtatatgaattgttgatcccagtgacaataattgaactcttggaataatgctctttgataaaacttattagatctaaggttgttttataagtgagcaaatgagtgctaataatttgattatcttgaagcaaaagcgagccattgtcagcaatcatgtcgattcggtttaaaaagccagcaaaatctttgcgtaatctggtataagggcgcccacttgaaacgataaagtgaatcccctttttgtgtaattctgttaagatgcggtcaaagcgcttgtgatcgaaagtttgatcatcatgcatgaaagtgccatccatatcgacagcaacaactttgaatggtaattttgtcataattatttcctttgaaaaaatctatatcttttaacaatattattgcataaaaaggccgagcagatcagctactcggtctttttggattcattttttcatctagagcaggttctagatacacttaaatattaacaaattgttctaccgaagtgagcggactcagataaacataagaaagatttacatatttggtagcgtcacttagctttttcattaggtcttgctgttcatgagttagatgcaggtgattcatggcaattcgagcctgaatatacatgaccaatttgctagtgtattcaagaggatgatcaccactgtcgaacttattaagaacaagcccaattgcatcgcgaatctgccgatagcgaccaatattcatttcattgtagatattgctaaaaaaactattataaaaattcttcaaatcttggtatacttcacgactttcgctttgtttcttttggttaaagagactgaacataactatcactcctttaaaacaggtataatttgcgtttttggattaaaatgatgctttaattcctcaggcaatggggtgtcggtaataaggacatcgatctgattgagggggacagacatgtatggcgaagaggattgattagtaaatttatatttttcggcaactaatacaacttgattagcgcgactagcggcggtttcgacaattttggaatcagccatgcttggtgtatatacgccgtcatctctgattcgagatccaccaataaatgcagtattgaaatggatttgacgcaatgtttctaatgctgtttcagaataaatgaaacgctgctttttgttgataacgccgcccaacaatctgactgatgggatttctattgctaataagcttaatgcgttgtcgattgaattcgtgacgatctgcatgtcaataccattaagcattggacagagctgctttaacgtagttgatgaaccgatgaaatcacattgacctggatgaacaaatctctttgccattctagccattttcatcttaaccggtgattgtacttgatttcttgctaaaaaatcaggtacgctgttgcaattaatttccatcaaaccaccatgaactctaattgcttgaccagtttcagttagatgaattacatctcgtcttgccgtatcaaatgatacattgaagtgagctgcaatctgtctagttgataattggtgctttttttaagtaactgtttaatttgtattaatctttcttcttgggtcatctcatgccctccatttagtaatctaacatgaatgaataattttgcactgattatgtcagtatttgatatttgtttatctgtacttatcagtatttaagcaactaaatacttatatcaaagcattaaaaggttgatatagcaacaaaaaagggatgcaattttaaattaaatacttattttttaattggtaggatccaattataaaaatagttgaactttttagataatttggtatgatataagtgtaaacaaaagaacaaatgaaaaagagcactcttagatgctcaaaggagaataagatggcagttgattatgactcaaaagactatttaaagagcgttgatgcttattggcgcgcagccaactacttgtcagttggtcagttgttcttgatgaagaaccctcttcttaagaccccattggttgcagaagacgttaagcctaagccaattggtcactggggcactattgcaccacagaactttatttatgctcacttgaatcgtgtgcttaagaagtatgacttgaacatgttctatattgagggttcaggtcacggtggtcaggtaatggtttctaactcatatcttgatggttcatatactgaacgttacccagagattacccaggaccaaaaggggatggctaagctattcaaacgcttcagtttcccaggcggtgttgcttctcacgctgctcctgaaactccaggttcaattcatgaaggtggggaattaggctactcactgtcacacggtactggtgctgttttggataatccagatgttattgccgctgttgaaattggtgatggtgaagctgaaactggtcccttagctgcttcatggtttagtgacaagttcattaacccaattaaagatggtgcagttctgccaatcttgcaaatcaacggctttaagatttctaacccaaccattgtttctcgcatgagcgatcaagaattaaccgaatacttccgtggcatgggctgggatcctcactttgtttcagtctttaagggtggtcgttttgacggtgaaaaggacccaatgcaggttcacgaagaaatggctaagaccatggatgaagtcattgaagaaatcaaggctattcaaaagcacgcccgtgaaaacaatgacgctactttgccacactggccaatgattatcttccaatgccctaagggctggactggtccaaagaaggacttggatggcaacccaattgagaacagcttccgtgctcaccaaattccaattccagttgctcaaggcgatatggaacacgctgatatgcttactgattggctggaaagctacaagccggaagaattgtttaatgaagacggttcacctaaggaaatcgtaactgaaaacactgctaagggtgaacatagaatggccatgaacccaatcactaacggtggtcttgatcctaagcggcttaacttgccagactaccgcaaatttgctttgaagtttgacaagccaggttctatggaggcacaagacatggttgaatgggctaagtacttggatgaagttgctaagctcaacccaactactttccgcggctttggcccagatgaatccaagtcaaaccgtctgttccaattgcttgacgatcaaaagcggcaatgggaaccagagattcatgaaccaaatgatgaaaacctggctcctagcggtcgagtaattgattcacaattgtcagagcaccaagatgaaggctttctcgaaggctacgttttgactggccgtcatggcttcttcgctacttatgaagcctttggccgggtagttgactctatgcttactcaacatatgaagtggctcagaaaggctaaggaacaatactggcgtcatgattatccatcacttaactttgtcgcaacttcaactgtattccaacaagaccacaatggttacactcaccaagatccaggcatcttgactcacttgtatgaaaagaaccgtccagatcttgttcatgaatacttgccatcagacactaatacgcttttggcagttggcgataaggccttgaaagatagagaatgcatcaatgttttggtaacttctaagcagcctcgtccacaatggttctcaattgaagaagcacaaaagttggttgacaagggcttaagctacattgactgggcttcaactgataagggtgctaagccggatgttgtctttgcttcaactgaaactgagccaactattgaaactttggccgcaattgatattttgcataagaagttcccagatctcaagattcgctacattaacgtagttgatgttatgaagttaatggatccaaaggacaacaagaatggcttgtcaactgaagaatttgacagattattccctaaggatgtaccagtaatctttgcatggcatggctacaagagcatgatggaatccatttggtttgctcgcaagcgttacaatgttcatattcactgctatgaagaaaatggtgatattactaccccatttgacatgcgggtattgaatcatcttgatcgctttgacctagctaaggatgccgtagaaagcatcccagctttgaagggcaagaatgcggacttcatcagtcacatggattacttgcttgaaaagcaccaccaatacatccgcgacaatggtaaagacatgccagaagtaaccgaatggcaatggtcgggcttgaagtaaaattaaaataagaataaattagacctatgcgaaaagcgtaggtcttttttgataaagagggaaaatatgaaaagtgggttagtacttgaaggtggagcaatgcgtgggctgtttacagctggcgtaattgatgtgtttttagaaaatgacataacctttgatttagcaattggcgtttcagccggtgctgcctttggcgtaaacttgaagtcggagcaaaagggaagagtattgcgctacaacatgcgctttgcggggaaaccatattatgctagttggaaatcatggcggcggtcaggcaatttgtatgcggctaacttttgttaccatattttgcctgataagttggatgtttttgataaagaaaaatttatgactaatccaatggacttttggtgtgttgcaactgatgctgcaacaggtgagccggtttatcatcaattacatgatgcaggttatgttgacttagagtggattagagcctcgtcgtcgattccattttttgctcatccagttgcaattcatgggcattattactttgatggcggtgtatctgattcaattccgtatgattttttagagcagcaaaactgtgataaaaaggtagtcattgctacacagccgaagtcttatcgcaaaaagcagagtaagctctatccactggaaaaagtaattttaaggaaataccccgcagtagtaaaaaaattggctactaaagctgaggattataatgcggtgcttgatcagatggtaaaagatgaagctgctgaccaagcttttattattcgtccaccgtttccgcttgaaattggcactttagaaacagataaaaaagagatgcgacgagtgtatgaggtcggacgagttgaggcggagaaagttttgccagctttgcgtgaatatttgaacaaataataaaacaagtatctaggaaagattaatcacttctcagatacttgttttaggttgttcataaaaatttctcaaaagcattgctgatgccatcttcgtcatttgaagtggtaacataatcagcatgctttttcgcttcttcggagccattacccatgcaaacagctgttccagcaaagtcaaacatggtaatatcatttctttcgtctccaattgccatgacctcttctggagtaatgccaagtttttcagttaattcttttaatccggttcctttattaacattagggtgaagtagctctaagaagcaatcgtcggcacgaacaatatacagctcttgcccaaattcttggcgaattttatcctcccattggtctaacaacttagctttagtggcaaaacaacctttagcaatttcaaaatcactaggcaattcatctagctctctaatgtataaagtcgcactattttcgtaagcttgagtataaaccattaaatcaacatcatgatctcctgtaattatttttgaatcaggggaaacaacgttaaaaggtaaatgatgctcgttagcaaaagcatacattttacgataaagtcgattagaaactagatctttagtcattatcttgccatctgctgtgcgggtaattgcgccattaagagtgatagcatattgattaggtccaataattcctaattcgtccataaaatgttttaatcctgcgattggccgaccagaacataaagcaacttttattccttggtctaaagctgttttaactgccttttttgtactgggcaaaatcttacctgttgaattaagcaaggtaccgtcggtatcaagtgcaataaatttgattgtcataataattcctcctgtgcatttaacttaccgttaattatgccagactttgtgttatttcagtaagcaaagtagttcatcttggaaaggaaaaaggttttatcacttgtttcgtttcatgaaatgaaatatcatcttaactttatgaaacaataagtcatagttttaaaaaacgcttacattagcttaaaactagagactgtaaaatattttgtgtaaggatgaataattccttaaatttatttcttaaaacattagaaaaaggagttcctttctcgtatgattggtttgaacaaaaaaacacatacagaaagaagaactccttcatgaatgattttacaaaaaatatagcacaagctctattcaatcaagacaaaataaacgatttattgcgcaaagagctacaacaggctgttaataacttgctagaagctgaattgactgcctttctgggctatgatccctatgccagaaatggctggaatactggcaattctagaaatggtgcttatttccgcaaggttgatacccagtttggaccaattgaagtgcaagtgcctcgagatcgcaacggccagtttcatcagcacacgctgcctgactacaagcagcactctgatgttttggaaagcacgattatcaagctctactccaaaggcgtaactaccagagaaatcgctgacttgattgagaaaatgtatggcagtcattatagtccagcccaagtatcaaatatttccaagcagatgctccccaaggttgaggcttatcacaagcgcaagctaagcgacaagtttttctgtgtctatttggatgcgacataccttcctttgcgccgagaaacgtttgagcgtgaagcagtctatattgccattggcattaaacctaatggacataaagaagtcattgactactgcattgcgcctagtgagaacattgaagtctggacagagatgcttcaaaacatgaagtccagaggcttgaagcaagttgagctctttctttctgatggtgttgttggcatgaaagcggccttgaccaggacttatcctaaagctcattttcaacgctgcttggttcatgtcatgcgcaatatctgtgctaaagtccgggtggatgaccgcgaaaagatcatgaacgaattcaagcagatacatcaacagacaagccaaaaagaagctgcagctgtcttgcatgaattttatgcaaaatggaataaagcttatagccatgttatcaaaggtttgagggaaattgagcccgatctgctggtcttctacaattatcccaaacaaatcagagcttcaatttattcaaccaacatgattgaatcctttaacaacgtcatcaagcgtaaagctaagcctaaggcagaatttccaactgaacagtcgcttgatgtatttattggcatccaggcaatgagctacaatgaccgctatttcaaccgaattcataaaggctttggtcaggttcaggataccttagaatcctattttgattaaataaatgattaaaaaatcaatttacgagaaagaactatttacacaaaagatttgacagtttctaaaactatggtataaataaaaatgtaagctagctactaagatagagttaagttcagaatttgatatcaactggacgttttatcttaaaacatttttgaggagtaaatatttgtgtgaagcacaaatggcaaaagtcaattgtatgagcaccttgcggttgacttgatctgatgaaataaagatgtagatgcaggtgtagatgtaagaataagttattgatttaatttttttcttcagaggtaaacgattatgatgcagaaaatacagcggtttggggccgctatgttcgtcccagttatgctgttctcgtttgcgggtattgtcgtagctttaggtagtttgttcaataacccgactctgtttggtttaattgccaacccgggaactacatggaactcagtttgggacacaatttcagctggtggttggacagtgttcaaccaagaaggtattttgtttactgtaggtttgccaatcggtttagccaacaaggctagaggtagagcagccatggaagcagttattgcttacttgacttacaactacttcatcggtgcaatgcttacccactggggtgcagcttttggtattcctaactttgacaagatccaaattgttgctaacgctactaaccatggtttaactaacattgctggtatcaagactcttgacactagtatcttaggtgccttggttgttgctcttattgtagtgtggttacacaataagtactttgataagaagttgccagactggcttggtactttccaaggttcaacttatgtctacgctttagcattcttcgtaatgattcctttagcactcattacctgctggggctggccaaaagttcaaatgggtatcaccagcatgcaacacttcatcgtagatagtggatttatcggtgtttggatttaccaattcttgaaccgtgtattgattcctactggtcttcaccacttggtatacattccattccaattcggtccagccgttgttgccggcggtttgcaaccatactggttgaaacaccttgctgaatacgctgcaagtactaaaccactttcacaaatcgcttcagttgaaggattccaactttacggtaacgaaaaggtattcttagtaccatttatctgtcttgccttctacgcaactgctaagaagaacaagaagaagcaaacttcagctttgcttatcccagctgctttaacctcagtattagctggtattactgaacctatcgactttacttatttgtttgctgctccagttctttgggtagtttactcagtattgtcagccacgatgaacacagttatgtgggcctttggtttaagaggattcatgtcagatggtgcgatcggtatcgcttcaatgaactggattccactttggccaaaccactggaagacctatgtgatggaatttatcgttggtattatcttcggtattattacttactttgtcttcaagatcatgatcgagaagttcaattacattactccaggtcgtgaagccgatgatcaagatgttcaccttctttcaaagaaagaatacaaggctaagaaggctgcagaagctgctggtaaggacgctaatgacccttacattgaaagagcaactgcttaccttgaattattaggtggtccttcaaacattacagaattgagttcatgtgctactagattacgtgtatctgttgccgatccaaataaagttgcttcagatgccgcatttaaagcaaacaaggctgtcaatgtcgtacaccacggtaaggctatccaagttatcgtaggtttggacgtacctcaagttcttgatgaaatgaacactttaatgcaacaacaaggtggcgacgctaaggtatcaactgaacaagataatccttatattgaaagagctactggtatcgttgacttgcttggtggtgactccaacattcaagatgtcattgcttgctcaactagagtaagaactcatgtcgttgatcctaagaaggtcgctccagattcagaattcaagaagatcgcagattcttacgaagtacaacataaagataacaacgaggttgacatcgttgtcggattggatgccgatcaagttgttgatcaaatgaaacaattgctataatctgaaagcgcttgtgttatcattaatatataaattacgcgtggtgctagttaaatcgttttagttaataaaaaagtccaatcttgttagactcgacttgtaaatagtaataatagaaaagagtctgatctgattgaactgccttaagcttaagcgttttagccaccatttacaagttagttttaaagatttagtgataatttgtcggcactggtatcgtttgtatgcaccggctgagtttactcatcggcgaaatattgatcaaattaaaactacggacagtctgattttggctttacttatctggcaagctaagacaggaattgaatcacaaagaagattctgtgaatgtttcaattgtttatcacactcacgttttaatcggcgttcacgtcagctattgcaattgatttatcagatacggcaagaaatgaataaaaaggttgacctgaatggacagttcttgatcattgacagctttccggtacctgtttgccaaccaattcgaaactatcgtgctaaaatttttcgcggttatgccaacattggttataaggccaccaagaaaatttacttctatggtttcaaagttcatgccattgttagcgatgacggttacattcttgattatgtcgtaacaaaggcatcagttcatgatgccagggagacagttgaactgatagaaaatacccatccatctaattactatcttcttggcgacgaaggctatttaggcaaagaactgcatcaacagctaaaacaaatgggttacgaactttggacaccatatcgtaaaaatatgacaggagctaaaaagcacaatgatcatcaattgatggctattcgcagaacaattgaaagcgacttttcgcttctgacctattacaatgccgagaacaatcgagcacgtagtctgataggctttcaaagccggttggaaattgcaattttagcttataatttggcttattgtctagaacgatttaactagcaccacgcgtatataaattatatattgataagggcacaggtattatggcaaatttgagatcaatggtctatgacaatagtcataagttgaatgattctgaaaaacagatagttcaatatgttctaaataatccgagagactgtagcaaattaagcttagccaaattagctaaaaagctttatgtatccgaatccgcaattttccggttatgtaaaaagctaggactaagtggctacagtgagcttaaatttgatttggtcgaattagccgaatcgaagcaaaaaccaatcaaaattgaaaataattttgcgcgggaacttagtaaagtaaattcagacgtgttgaagtatttcaaacaacgtgatttcaatagcttgtatcgcgatttagataatgcagggacaatttacatttactctactggttggcaacaagagttaatcgcacaatatttggctcatgaattgtttgtagttggcaagcatgcaactgttttgccatcagcattagaggagttaaaagctgcgggacgctttgctcaaaaaggcgatgttttgtttattatctcgtttacgggtgataataaaacgatcaatgaggaaatcactaagttggaactagtgaatgataaattcaaatatgtttcgttcactaacctgaagcaaaataaattagcttcattagtgcagcacaacatttattttccaacgattgcctttactgatgatgccgactttaagagcgggaaggttgcctttaccccagcgtacttcttaattgatttggtaattagtgaatatgtagcttggcaacagagtcaaggagaggatgtagagatcaatgtgggcaattagtaaacgaaaagttggcaactttatcgatcgaataaccgaaagcatgcacttggatactaagaagattttgacttggtattcatacgtacttttcattgctccactattgttttgggcgatgattgcactacgaagcggtgcttctggtcaatcgattcggatgatgattatgaagcagccgatgattgcgattagtacaatcgttgctatcgttgacttcatactaggctactatatgttgttaaaccacaagcagtttttaatcaatcgacagacttatcgcttcttgatgggaagtcagatgattgctcagctctttgttggcaacttgctttgcgtagtattagctatcttaggtttttatcgagcaagagctttgaagaagacacaagatggcgttagtcgagtaataatcgcaatttcacttactgcagctggtttattactcgcaagctttatgttgatattattacttgaattttagaaatccagaggttattaattatgtttaatttctttaagaaaaagaataagggtattgaagtagatgcggtagttgacggcgacattatgccaattactgatgtaaaagacgatgtcttctcaactaagatgttaggtgatggctatgctatcaagcctaaggataatcatatctatgcaccagttgatggtagtatttccacactcttcccaactaaacatgctattggtatcacgaatgaccaaggtattgagtttttgattcacttgggtcttgatactgttgaactaaaaggtgctccgtttacagtgaatgttagtcaaggcgataaagttaagaaaggtcaacccttagccacaatggatttccaaatgattacagacaagggatacgatgacagctgcatcgttgtctacaccaacatggacctgattaagtcagttactccgattgaaaaaggcagtgttgaacattcccaaaaagtacaaactatcgaacttaaatagtcaactttcccctctctcatgtaaaaatttaacgactatttctctagttttcggcttagcttctacgttgaagctaagctttttctgttagaatgttaattaagaaagaagggcatttatgaaaagatatcgaccgaacactaaggcagtcattgtgggtatagttttgatgttaattggtatagcatgctgggtaattaaggcatcatttattcctaagggagcagacttcttgtttccgattggcttacttgtgatttgtcttggcggattaactttaaccattactgcgtttattgctatgcgaaaaaatgatcttgcaatgagtgcttatttaaaaaaacaggcagcagaaaagaaaaagcaagaaaagagcaataattaagctttttaacagttttttactataataaaatatagattgttattatataagcaaaaaggaattgaggaaaaatgaattttaaggatgtttatgaaaaggaacatgtaacgcggaagtttactaatagaaaattacaagaaaaaacaattgctggaatcgttaaaatggcacagcaatcaccttcattgcttaattctcagccatggcgtgcatatgttttgatgggggatgctttaagcaagtttaaggctgcttcagctaaaaagattgatgataaagaagttgcacatgaagattttgcttcaatgctatcactagattgggatacttatccaagtcgtaatatggctacgatgggtgcatcccaaagtttctttttcagaaataagcttcaattatttaatgatgcgaataaaacaatgttcaatgcaccagcaattatctttttaacggttccgaagaaatctccagcttggtccgtttttgacttaggaatttttgcacaaagtatcatgcttttagccattaaccgtggcttaggtgtgatgccagctcactcaatggtttcatacccagaattggttagagaatatgcccaaattccagatgatgaagctgtcggaatggcaattgcagttggctatatcgacaagaatgctgaaattaatgatcctaaatttattccaaagcgtgtaccgtttaatgaaatttacaaggtggtcgaataaattacaaaaaaccgttatcccttgtgtaaaactgcactattttaggcaagaaatggtaaaataggttttagtaatatatttgtaaaaaaaggtgataatactttgagtccagctcaaatagtaactaatttagttgcaacattattaatatttatcgttgcatcattctttgttgctgcggaatttgcgttagttcaaactagaccaagtcagctcgaagatatgcttgctaagggtcaaggaaataagaaaaagttgcgtcgtgctttgcatatgacgcacaacttgaatgagtatttgtcaactactcaggttggtaccactttggttggtgtagtcttgggttggttctcggctgatacattcgcaaccatattggaagatcttttccatttgacgccaatgaatgattcactcatcaagtcagttagtgcaatcttaggcgtagttttattaacttatttggaagttgtcttaactgaagttgtgcctaagaatattgcgattgacaagccagtaccgatgatgatggggatcgttacgccacttcatattttccatacgattgtttatccattcgtttggctattaaatactagctccaatggaatcttaaaattgatgggctttactccagctgatgaagaaaatgaagtttattcacaatctgaaatcatcaagttgtcgcgtaatgcggttcatggtggttcgcttgataaagaagacttaacttatatggaaagagctttcgaattaaacgataaggttgctaaggacatcatgactgacagaacaagattgtcagtacttgattcaactgatacaattgcctatgccttgaaaaaatacttggaagaaggctacagtcgttttccagttgtgcgtgataatgataaagatgacgttgtgggttatgtttatgcgtacgacattgtgcaacaaagccaaattgatggcaacgtaccagtaacaagaattattagaactattatcacggtacctgaatcaatgccaattcaagatatcttacacttgatgatttctaagcacacaccaattgtcttagtagttgacgaatatggtggtactagtgggatcgttactgataaggatatttatgaagagcttttcggttctgttaaggatgaaattgatgatgtttcagatgattacattatcaaggacaaggatggtcaagttcatgtttcaggtaagacgactttatatgactttgagcgtttcttccatacagatctgaaggcctttcaagatagcgatattattaccattggtggttacatgatggaacattatcctaacttgaaaaagggtgaatcaattgaacttgaaggatataagtttaccttagacagtatcgaacaaggctttatgcgctggtttatcgttgaaccgattaaggataaagatcaaaaagacgatcaatcaaaggatgaaaattagaaattattcagaggaagcgttgaaaatgacgctttttttgtttaaagatgttataattctttttattaggaataatatatgtaaattgaattgaagggtagattaaatggcaaaaggcgacaatattgaccaaattatagatcacaaattattcacagaagatgacattcatgagatgtgcgtccgtttaggtaagcaattaactgaggactatgctggtaaaaagccggtagttgttggggctttgaagggtgcaatttacttcttgactgacttaactcgacaaatggacgtagcacatcaactggattttctcgatgtttctagttatggtgatggctttgagtcaactggtaaggtcaagatagtatcagatttggtaactgacgtgaaggatcgcgatgttttaattgtcgaagatatcgttgatacgggtttaactttgaaattcatgaaagaacacattatggcacgtggcgctaagagcgttaagtgttgtgcaatgctaaataaggaagccagaagaactaccgatgttgaattagaatattatggttcaaaggttggcaatgaattcgtagtgggttatggtttggactttttaaatatgtatcgtaaccttccttatgttggggtattgaagccagaagttattcaacattacgctaataaataaggatgaaaattagataaagaatcaagcgagtgagaatgatcactcgcttttatttactgcttttgataaaaaaattctattaaaatatcaaattaaatttattttttagatttaatattgtggttataatataagcggtttagtaaaaagaacaagtaaaggagtagtttttatgaccaaacaaactattaaagctcaagcagatggtcgcaatggtcaaattgattttgagattgacttagaaaacaataaaattagtgatgtcaaagtaaccaagaattcggaaactcctgcaatttttaatcaaacttttggtaaattaaagaaaaatattattgataatcaaagttttgacgtggacgctgtttctggggcatcattgatgactcaagcaatgctagattctggtaaaaaagcattagccgaaaataacattgctcttgacggaaaaaagccagaagtcgtacatgaagaaaggcaactaaatgttgatgtggctgtaattggctccggtatggccgggttaatggcggcaagtcgtgctctttcgatgggtaaaaaagtagttgtacttgaaaaaaatggctatttaggtggagcaactattttaaatggctcaaatgttgtaggaactggctctaaagtttctgcagaattatttggtgaaacggcaaagaaggattcgccaaatagactagttcaagatattactcgtgaatgccgcggtactaattatccaatgttgtcaaagctattagctaacaatattgggaaggcagtagactttattactgaatttgcaaatttgacttatcaaaaagcggaaacccaaacagttgaacatagtgtatatcgtcaaattgaaatgcctagtgaaagctcatatgaactagtgactaaggtggctgaggcatttgaaaaaaagggcggacaaattatcttagatgcccgtgttgaaaagttgaataaagataaggctggcaaactggtatctttaaccgctgaaggcaagcaccagacaattaatgtcaatttcaagtcacttgttttagctgctggtggttggggtgcacgtgattatcaggctcataagactgatattccatattatggtccaatgacttcaactggtgattatcttgattttgccaaaaatatgaatttggttactcgtaacttagactggtataaggtatatccacatggattggaagttgaacctggtattgctaagctaacaacttattcaactaaagaagcgaccgatatgggggctatttttgttaatactgatggtaagagaatagttaacgaatctgcaccttatacgcattttagggatgcgattgctgaacaaaagggtaaggtagcttacattgtcatggatcaaagaacctgggaccgtttctatgaattaatgcttaagtatggctttaccaaggaagaggttcaatcattctttgatttggttggcgagaagagtccagttctggtcaaaggcgacttgaagaccgtggcagaaaaagcaggtattgattatcaaacgctgaaggaaactgtggataactatactgaagatgttaaagcagattatgatcctgagtttggtagagacaagaagtttatgcatgagttcgaaggcgatacatattatgtaattgaacaaaaacttctgttctgcacaactttgggtggatatgaaactactgatcaaatgcagcttcttgacaatgatatgaatcccgtaagtaacttctatgctgcaggagaaattgttggtggtgctaatggtcatgattcaatgccaagtatgatgaattcttggagctatgcttctggttttgttgcaggtacgactgctgcggataataccaattataattattttactgtttcaaatgaacaagaagcagatgctgtatcaggcgcctctgaagcttaatttaaatactgaaacttgaaagcaccaaaatcaagctcaagtcctgtcactattgagcttttctagacgtaattagtttttatatgatctgtttcagtgcaatttgtatgaatcgtggcagttggttaataaagtcattgattacttcatctatcttttcaaaactattctgtttaagctcttttaattctgaaattaagtagaccaatgcatctacgaatctaatatcaggtaaggattcgttcattagatagaataaatctccgattgtcttatcatctgtattttgtctttcctgccaggccaatagatcataagttattgctgtaactgcgatatagccacattgtccatcatagctttgaacttgagatttatctaaagcaagatattgcttatacgtcttaaaatatgtttcaatttgccatctacgaccataaagttggatgatttctttaggtctaagctttgtctgagtagtagctaaaactaaatacttgttcttgtttccacggttggagacaaaaacgagctttaataaaaagatatgtccatgatattgagcctcaactatgcttgaataaagataatgtttctttttacggatgtttgaagcagccaatgagccgagctgcaatcaagcataatagtttttgccagttgattcttccatcgttaagtacattgcgagcagttctaacggaaaaacgcttgtcactcttagctctgaataaggaaagccgagcaaaatgtacagacatcagccaagagataatcatggttaatgaaacggtagatttacgcttaaagttgacttgtttagtcaacttagctagaccaattagattaataaatgaagaaattaaggatttggtatcgttttctgtgtcgatttgttctatactgttcattgcgtaggatctcctttacttttcaggttgacacttaaagtataacgcagagagatcctgcgtttttatttttgataagaaaaagccaagaggcgcggggaaggagcgttaatcttagctttcaagtttcagtttattaattaaatcatgcaattaaaaagtttaatgtggataactatttgcattaagctttttttatttggagaacgaaacatagttatctcataacaattttattatgaaagtatagtgaaattgatatttgatacatcaacagatgacgcactaatattaacttgtggataaaattaaacttattagaggtgtaagcaatgaagtcaggaaaatatcaagtaaaagctaaaggtcatggttccgaatcaatgccaatggaagttgacattgatggcgataaagttacttcaatcaaagtagattcatcaggtgaaactaagggagtagccgatgaagtatttagacgtttgcctaaaacaattgtggaaaatcaaactttaaacgttgatgcggtcagtggcgcgactatttccagtcatggtgtgattgatggcgtagccgaagcaattgatgaagcaggcggcgattcaaccgaatggaaaaaccgtgaaaagcccgctgctacaaaggtagaagatgaagaaattactgttgatgtagctgtagttggtgcaggtggcgctggtctagcagctgcagttcgctcaattcaacatggtgaaagggtggctgttctcgaaaagtatccacagatcggtggtaatactagccgtgctggtggtccaatgaatgcggctgaaccagaatggcaaagtaaatttaaggctcttcctggtgaaaaacagactttagaagacttggctaatacgccaattgaacaaattgatttagaataccgctttgattttgaaagattacaaagacaaatcaaagaatatattgattctggtacagattatttatttgattcgactttactccatgaaattcaaacttatttaggtggtaaaaggactgatttaaaaggtaacgaaattcatggtaaatatgctttggtacatgaattggtaactaatgctttaaattctgttaaatggctccaagatttgggtgttaagtttgataattctcaagttacagaaccagttggtggtttgtggcgcagaggtcataagccagtagagccattaggttatgcctttattcacgttttgggtgattggataagagagcatggtgtcgatccatatcttgaaactcgtgttgaaaaactaattattgaagatggcaaagtacgcggtgtaattgcgacacgcgctgacggtagtactttgactgtgcatgctaaggcagtaattttaacggcaggtggctttggtgccaatactaagatggttcaaaaatacaatacctattggccaaacattgcagacgatagtacgatagtacaacaactaattcacctgcaattactggcgatgggattaacttaggtcttgaagctggtgcagacttattcggtatgggctttatccaattaatgccagtagctgatccaaagaccggtgagcttttcactggtgttgtaactccgcctgctaactatattatggttaacaaaaagggtaagaggtttgttaatgaatttgcggaacgggatgttttggctaaggcagttatcgaaaatggtggtttgatttatcaaattgcggacgataagattaaggacactgcttacaatacaacccaagagtcacttgatgcgcaagttaaggctggaaccttgtttagagctgatacgcttgaagatttggcaaaacaaattggaatgaatccagcagttttggttaaaactatccaggattataattcttacgttgatcgtggcgaggatccagacttccataagaatgtattaggcctcaaatgtgaagttgcaccattctatgctactccgagaaagcctgctattcaccacactatgggcggcttagtaattgatactaaggcacatgttttgaataaagatggtcaaattattgatggtctatattctgctggtgaaaatgctggtggcattcatgctggtaatcgtttgggtggtaactccttggcagatattttcacttttggtcgaattgctgccaatactgcctatgaagatcatcaagaaaatgatgcaactagcggtgcttcacaacattaataaatatatttactccccggatttaaaattgaagtgcaacactaagtgttaaacaaaaaggccatgaagacctaaacttgaagtgacgaaaaatcaagaaaggaagatctttatgaccaattcaaattctagcatttctaagcactatcatcaattaaccagcgtacaacgtggacaaattcaagcaatgctggattccggcataacttcccgtactgttatcgctcaagaagtcggctgccataagtcgacaatcagtcgcgaaatcaaacgcggaagtgtcctgcaaagagacagcagctatttattgtatgagcactattacgctgatactgcacagatttattatgagaagcgtcgcaaaaactgctatcagcgcaatccattgaagcattatgctgtctttttgagaatgctctccagacgctttaaagctaaatttgatgccaccagcatcgatgagttcgttggtgaattcaaaaggactatgccaggctacccttgtcccagcacaccaactgtctatcgctatattgatcagggcttgctggacataagcaatattgatctgcctatgaagctcaaaagacgcaggaacaagcgtcatcacagccatggcggtcacgctttgcacaagaagcatcttggcaattccattgaacagcgtcctaaagagattgaagacagaaaagctccgctgcactgggaaggagatctggttaaaggcgtcagacgcaagaatcagcctgctttaatgactttgactgaaagaaccacacgctttgaagtagttatcaagattcctgactatcgggcaagcacatgccaaaggctgcttcaaaaggagattgacagacatcctgcctggtttaaatcaatcacgtttgacaatggctctgagtttgcggatatgaccaagatcaagggctgccagatttactttgctcacccatattctccatgggaaaggggcaccaatgagaactgcaatggtcttttgcgtcaattcttccctaagagcaagagcatgaaagacaagtcaaaagcttatgttcaacaggcaactgatgccattaaccacaaatatcgccgaatcctccaatatcacacagcagaggaactcttcaagcaatatatctcttcataacctaactgttgcacttaatttgacaattcaggaaatatatttactcaaataaaaagtcacccaaaatcggcggcttttttcgttaattatttttcttttgcatgtaatagtaaattggcagtcctaacaatgttaaaccaataccaataattgaaagaacaaattgattgataattgttgagacaacgatgaagataccaccgatcacggaaataattggaatgatcggataccatggaaccttaaatggacgttttaattctggctcacgctttctcaaaattattacggcaactgacaacattgtgttgaaagtccacataacgaagactagcatgtcagttaaaacagtaaaattacctagtagaatcatgacaattgcaatagcatcaacaataaacgcgccaactactggaacaccggtatggatattagccttgccaattttattggagaatggcaataaattgtcttgagccaagatataaggcgtgcgcatccctgtcagcatgaatgcgttaaccgcaccgtaaacagaaattaaaattcccacagtgactagttttccaccaaattgaccaaacaatttcattgaagcttgaaacgcggcattattgttattagttaattgatcaataggtaaaacggtcatgaaagtataattgattaaaacataaatcaatgtaattgctgaaagacctaaaataattgcccgtgaaaggtctttttctggatttttgacttcgttagccaaattagtcactacaatccagccttcgaaggcgaataacgcagaaagtaacccttgactaatggcggttggaaatgaatgtccagtgccgactgttaacggaataattggtgcaggtattttggcaggattaaataatccccaaataataattaaagcaattggaatgatttttaggatagtgatgaccgactgcattttgctagaaaatttagttccgattagattaattcctaagagaaaaagcactagcaagatagctattaggttagaatacctcgccttaattccaaataaggagacaaactgaacgccaaaaattgagcttagggcaccaatttgagctggaaaataaacaatcatttgtgcccagccaaaaagaaaaccccacacgcggccgtaagtgtaatcaagatacttaatggcaccattaatttttaagctggcggcaatttctgaaatggtcaaacctgatgcaattgaaatgatcccagctaaaatccatacaaacagggtcattgaagtgctgccagtttgtgcagtaattgttccgatcttgaaaaatacgccagctccgatgacagaaccgactacggtagccaatgcttggccaaatgagatttgtcgtttcatatttatttgttgcccttcgtttacattatttaaattttagcacatcgactggaaatttgaaactgtcaaatcttttgtgtaaatagttctttctcgtaaattgattttttaattatttattcaaaataagattctaaggtatcctgaacctgaccaaagcctttatgaattcggttgaaatagcggtcattgtagctcattgcctggatgccaataaatgcatcaagcgactgttcagttggaaattctgccttaggcttagctttacgcttgatgacgttgttaaaggattcaatcatattggttgaataaattgaagctctgatttgtttgggataattgtagaagaccagcagatcgggctcaatttccttcaaacctttgatgacatggctataagctttattccatctggcatagaatttgtgcaagacagctgcagcttcttttttgcttgtctgttgatgtatctgcttgaattcgttcatgatcttttcgcggtcatccacccggactttagcacagatattgcgcatgacatgaaccaggcagcgttgaaaatgagctttaggataagtcctggccaaggctgttttcatgccaacaacaccatcagaaagaaagagttcaacttgcttcaagcctctggacttcatgttttgaagcatctctgtccagacttcaatgttctcactaggagcaatgcagtagtcaatgacttccttatgtccattaggtttaatgccaatggcaatatatactgcttcacgctcaaacgtttctcggcgcaaaggaaggtatgtcgcatccaaatagacacagaaaaacttgtcgcttagcttgcgcttgtgataagcctcaaccttggggagcatctgcttggaaatatttgatacttgagctggactataatgactgccatacattttctcaatcaagtcagcgatttctctggtagttacgcctttggagtagagcttgataatcgtgctttccaaaacatcagagtgctgcttgtagtcaggcagcgtgtgctgatgaaactgaccgttgcggtctcgaggcacttgcacttcaattggtccaaactgggtatcaaccttgcggaaataagcaccatttctagagttgccagtattccagccatttctggcatagggatcatagcccagaaaggcagtcaattcagcttctagcaagttattaacagcctgttgtagttctttgcgcaataaatcatttattttgtctggattgaatagagcttgagcaaaatctttggtaaaatcattcatgaaggagttcttctttctgtatgtgttttttttgttcaaaccaatcatacgagaaaggaactcctttttctaatgtttaaagaaataaatttaaggaatcattcatccttacacaaactattttacagtctcggaaatttttgtattgataggcttttcggttaaaataattaagggaggaatttagccgatgaaaagatttcagcataagtatactttgccagcgattttgactttattaattctggcgattgcatttcttttgattggctttttcaattttaagcggcaaacaactttaccgccagatgctaattcaagtgcgattgggattgagttaaatcaagatattgactatgttgatttacataaattgcaatctaatggcgtttcctttatatatttgaaagcaacccaaggcagatcatattttgatgaaaactatctgtcttatcgtgaccaaattttaggaacgaacttggcatttggtagtgagatttcctatagcaatgaatcgactccgatgcagcattaccgctactttttttaagcaagtaggacaaaatacgggctcgctgccaattctaattgtaccggcagtgactactcgttcagcgagatatttgcggtcaatggggcagtttgcggctttattgcaagcagctggcaaaagagtcatggtgaaagttgatcataaatatcaacattactttaatccgcaaacgttatttatgtcatcagatagtaaggcaccgaataaattaaagtattcattttggtgctacactactaacggacgcgtaaggaatgtttcaggcttagaaagccaggtaacgatgtacgcgtataacgggaccgttggtcaatataagcaaaagtatgggcaattaacacagtaataatgtatcaagaaaaaatcaaacaagttttaattagagaacacaaggaccagccaactttaattcaaaaagaaagctatgatgccattcgcaatggtgcgagcctggttggattggctaagacaggtacgggtaagacattggcttatgcacttcctagtttggaaaaagcacagccaggtaatgctaacagcgtggtaattattgcgccaacgactgaattagctgtacaaattcgtcatgcaattaatccttacatccacgctttaggattaaaaggcgtcagcttggttggtgctggcaatagaaagagacaagaagacaatctgaagaaaaagcatcctgaagtggtcgtagctacaccaggccgtttttttgacttcttctcaagtggtcgaattaaagtaaaccagatcaagactttgattattgatgaagccgatgatattttagaatttactaaaatggaattgttatcagcattagggcaaaatctgggtccagacagtcaaatcttattatttggagcaacagattctgagattacacgggatgcggagcaagtttttaaccgtcatttcttgttagtagatgtcagaaatgaacaagcttcagcgactaaacattattttttgcaagtagacaatcaacacaagattgaatttttgcagcgaatgactaagttggatcactttaagggaattttgttctttgattcaaataaaacgatgatgcgctttgctggtatttttgggcatactaagactaagttcgaattattagctaatgaatttggtaaagaacgccgtgaaaaagccttaaatgacctagctactggtaagacgaaattgctgctagcaacggatttggctgcgcgtgggttggacattccaggccttacctatgtgattaattttgatattccgagcgagactaatacttacatgcaccgggcaggaagaacaggtcgaatgaacgctgaaggttatgtggttaccttaggcgatgatcacgattttcgtgatttgaagaaattattggcagatcaattacaaatagagcgtgtctactttgcaggctatcatttaacaactgaaaagcctaaactcaagaaggaaaagaagcaggctaaagagcagcccattaagacttcgactaagaaaaataaaactaaaaaacgcaagaaacgtaataagaacaagggatatcatccacattacttgaaaggaaagaaatgattcgtttagttagatggctagaggactatgttttgccgctagctagtagatggggtcagataagatggctagttgctttacgggatgcatttgtctcattaatgccaattacaatggcaggatcattagcagttttaattaagagcttaattgaagcagctcatgatcatttaggctggtatgcctttgcttttgcgatacagccattggtagcaatcagtaatttagtttggcgaggaacattttcattatttgcctttttcttagcattggctttaggctatcaactagcaaaagcttttgaaggaaatagacttgctgcttcaattgtggcattatcttcttttgcactaagcattgccaatatagctaagattaaatttcatggtgataatgttacactgcataatgcatttgacattagtcagttctcaactactggcctctttactgctattttgtttggctcattaggcttttttatttattatgcttgctataaagcaaggattatgttgcatgtgacatcgaacttgccccatgctgaacaagctgcttttgattctttattacctgcaatgattgcaatatttggtgtaggcggaattaattatttgttccaaattcttaccggtaaatattttggaaattggttgcttaccacaattcaaactccattagtaaagtggggacaaggctttggtacggtaattgtcattactttattagtgcagttattttggttttttggaattaatggtataggggttctatcaccaattttggattcaatttggatgactgctcaaaatgataacatcacagcgattagtaatggaaatattccaccatatgtatgggtacgtggctcatttgatgtctttgcctggtttggcggtgctggtggaaccttaatgctaattgtggcgattttaatgttttctaaacgcagtgattatcgcacaattgccaaaatctcactagctccaggaatttttaacattggcgaaccaattctcttgggcctgcctgtagtgctaaatccagtgtatctaattccatttgtattagcgccactagttaatgttgccttttcttattgggttagcattatgggattggttaatccagttcaagtggcagtacctagcatcatgccaccagttattggcccatttctggcttgcaattatgattggcgtgcaattgttttaagcattttaaatatgattgttactttgctaatttggatgccttttgttaaagcagctgataagattgctgataccaaccatccgaaaacattttttaatccacaattctaaaaaaaggttaactattaccactttttttggtaaagttaatcttaggtttgaccccgtagttcatctggatagaacaatggtctcctaaaccgtagaggtgagttcgaatctcaccggggtcatagaaataagcctgcaagtattggtcttgcaggctttttacatgctttggttatccaaaaggtatctttattatcctaagggttgaagcataattgcagtaattaagccccaaactaggaaaacacagattagtgcagtataaagtaaatattttctagttttagcgggtctgtttttgtccataccaaaaacaaggcaaaaagttccaatcaaaataattaaaccagttgtaattaataatagtaatgatgaattcatgcatcgaccaactttcaatttaatacttccattaaaacacagaaagcgggtgcaagatagtctaaaatcaggtatagtaaaatagttaagcggaggaattttttaatgaggaaaattaaggtaatgactgtttttggaacgcgtccagaggcaatcaagatggcaccacttgttttgaaactaaaaaaagatgatcgttttgaagaagtaacggtcgttagcgcacaacaccgcgaaatgttggaccaagtgctagatatttttaaaattaaaccagattatgactttaatattatgcaccaaaatcaaactctagaagaaattacttctaaagtgatgattgatttatctaaggtgatcaaagaagagaaaccagatattgtcttggttcacggcgatacgacgactagttttgcggcttctttagctactttttatcagcaaactacattgggacatgtggaggcaggtctgagaacttggaataagtattcaccatatcctgaagaaatgaatcggcagatgacggatgatttagccgatttatattttgcaccgaccgaattgagtaaggctaatttactgaaggaaaatcaccattctgattttattttcgttactggaaatacggcaatcgatgctttagcacagactgtacaacaagattatcatcatgaggtaatggacgcaattactcctggtaataaggtgattttggttactatgcaccgtcgagaaaatcaaggtgagccaatgcgccgagtatttaaagtaatgcggcaagtaattgattcgcatcctgatgtagaaattatttatccggttcacttatctccacgagtacaaaaagtggctaatgaagtgcttggtggtgatccaaggattcatttgattgagccgcttgatgtggtagatttccataacttagctaaacgttcatactttatcatgactgattcaggtggcgtacaagaagaagctcctagtttaggtaaaccagttttggttttacgtgatacgacggaacgtcctgaaggcgtaaaggccggtaccttgaagttagttggaactgaagtcgacaaggtgcgtgaagaaatgctagctttgttagaaaacaaaaacgaatatgatcggatggcgaatgccaaaaatccatatggagatggacatgcagctgatcgaattatggatgatatttattattactttaatcaagatagtgaaagtaaaccaaaagattttgagtaaaaaaataaagagacagttttaatttttcaatgtcattaagttaagacattgacaaattgaatctaatctctgtagaaccgaatcattatgatttggttctttttttgcataaaataaaggcgaaaagaacctaccttttcgccctctgattaaattattaaaccttcaaaattattgccagaaagctggtgttaattatgaaagcccttcacagaaatattttagatcgtcttgatcaaattatcaatgatactggaaagcatattcatgattttatcgatgatcctcatgccttcactaggaagcggtttttagatgcagctacagtcattaaaactactattaatatgcaaggaaaagatttgaccagtgagttgtttagagcttttggccaaaaagctattaaaaataacgataaagtagtcagtacttccgcttatgtccaacgcaaaggtcagctttcacccgcatgttttaagcatattctaactgtatttaatcagaatttatttaatatccagttatttgatcataaatatcgtatatttgccattgatgggtctgattttaatcaaatctggaatcctaaatcagagaatatcgttggaaatctcaatcataaaggaaagccatattgccaaattcatgttaatgcactctatgacctgttaaataatacttatcaagactgcatctttcagcctaagtcaaagatggatgaacgtaaagccgccgttcaaatgcttaaaaagctaaattgcggaccatatatagttactatggatcgaggttataccggctttaacatgattgaaaattgtaatcgcctgcctaactgttattatgtcatacgtactaaaacgggatatggcgcatttaaggaagtagctgagttgcctaatcaagagtgtgataaggatatagcttgctgggtgactacctctaattattattatgaaacccataaggctacagaaaacgttcatttggttaaccatcattaccgtcaatatataaaatatcggtctaaaaataccaaagatggcagctgggactttggagagttatgtacaataaaatttcgtgcctgtaaatttagaattaatgatcctaaatcaggcaaagaagaatgggaagttgttctaactaatctaaatagagccgattatcccttaaaaaggatcaaagaaatctaccatttgcgctggggcattgaaacttcattcaaaaagttgaaatatgctttaggtagcgtacagtttcattccaagcaggatagatttattgaaatggagatctatgcccacatgattatgtttaacgcagtcagtcaaattgatgctcaagcatatgtaccacaaaaaaaatgcaagtatcaatatgcgatcaatttcaaacagtcatgttttgtcatccaggctatgtatataatttcttcttcaactgaaatctttaaaaagattcttattcaaattagtcattacacaattccgatcagaccaggacgaaaagacaaaagaaatctcaaacccaaatcagctgtatattatttatatcgtgtagcctaatttctaaacaagatttgggtttatttggcatgaaaaaagagcattcaaatgcgataaatcgcaaatgaatgatcttaaaagtccaagtcgataatttgtcaatgtcttaacttaatgacattgtttaatttttgctgtctcttttattttttggttcttgaatgcgcatttttgcacgttcaatcatagtatgttcttgcttttgaaagactgatctagtagttaagtaattgaatacaccgactaaaatttggtcgataattttgactagtaatgcgtttaaatgcagccaggataagccgactaacataattaatgtatcagggattaaactgatgacgcgataagtgaaaaagacgattagtttatgccacgtgctgtgttcatgatcgacattattgataaaaacagccttttggttaaaccagaaagatgccaggttggagacgatgaaggcgatggtgttagaaattaccatcacattatgccaccatgagtgtaagaccatgaagactaaggtattgattaatgcagcgacaaagccgaaaaccatgtaaacccaaagattacggtgtcgcttgattaatttttgacctagacggcgtatttgtgcctgatcaacagctgtgacgtcttttttgttattagccatttaacttatcggccatttcctttgcagcttgatcgattgcagcgactgcatcatcatctggcgcattttcaattgttacgggtttagtaatttcagttgcgccgcaatccttgaatgctttttcatagtcaaaaacattttcacaaaagtgttcaccgtaggtcttatcgccagaacccatcacagcaaaatgtttgcctgttagatctaagtcttttaactccccataaaagtctgccaattcatcagtcattacgccttcaccataggtgtaggtgataaaaatgcaaagatcactatctaagtagtcattggcatcagtgaagccgacatcacttgtttcaacgtcaaagccataatcttgaagatcttcttctaaaatatcagccatgtcttcatcgttaccagtcatgctggcataaacaattcttgctttcatgatttttcatacctttcactgcattatacgacaccttattatacatgaaactattgcaaaaacgtttagttttagcaaactttaaaaatatttcaggcctgaattgtcaaattaagtgcaacagttaggttatgaagagatatattgcttgaagagttcctctgctgtgtgatattggaggattcggcgatatttgtggttaatggcatcagttgcctgttgaacataagcttttgacttgtctttcatgctcttgctcttagggaagaattgacgcaaaagaccattgcagttctcattggtgcccctttcccatggagaatatgggtgagcaaagtaaatctggcagcccttgatcttggtcatatccgcaaactcagagccattgtcaaacgtgattgatttaaaccaggcaggatgtctgtcaatctccttttgaagcagcctttggcatgtgcttgcccgatagtcaggaatcttgataactacttcaaagcgtgtggttctttcagtcaaagtcattaaagcaggctgattcttgcgtctgacgcctttaaccagatctccttcccagtgcagcggagcttttctgtcttcaacctccttaggacgctgttcaatggaattgccaagatgcttcttgtgcaaagcgtgaccgccatggctgtgatgacgcttgttcctgcgtcttttgagcttcataggcagatcaatattgcttatgtccagcaagccctgatcaatatagcgatagacggttggtgtgctgggacaagggtagcctggcatagtccttttgaattcaccaacgaactcatcgatgctggtggcatcaaatttagctttaaagcgtctggagagcattctcaaaaagacagcataatgcttcaatggattgcgctgatagcagtttttgcgacgcttctcataataaatctgtgcagtatcagcgtaatagtgctcatacaataaatagctgctgtctctttgcaggacacttccgcgtttgatttcgcgactgattgtcgacttatggcagccgacttcttgagcgataacagtacgggaagttatgccggaatccagcattgcttgaatttgtccacgttgtacgctggttaattgatgatagtgcttagaaatgctagaatttgaattggtcatgaagatcttcctttcttgatttttcgtcacttcaagtttaggtcttcatggcctttttgtttaacacttagtgttgcacttcaattttaaatccgggaaaatatttcaggtatttctagagttttgttttgattctacaaaaacccgaccttttaaaagtattttggaaaacggtataatagaaatatctgaaactaaataaaaatttataaaggagaaattattttgattacaattaaatcaattcgtgaacttaaaggcatgcaagcttcaggacatcttcttgcaactatgtttgaaggcttacgtgatgtgattaagccaggcatttctacctggaaaattgaagagttttgtcaagacttcgtatcaagtcgtggcggccgcctttcagaacaaggttttgagggttataagtatggtacttgtatttcggttaacgatgaaattgcccaccaaactccaagaaaagatcgcatcttaaaggaaggcgatatcgttaaggttgatgtaacttgcaacttgaacggttatgaatcagattcatgtactacttatccagttggcgaaatttccgaagctgataagaaattaattgaagtaaccaaaaaagcaatgtatctcggaattgaccaagctgttttaggtaacagaattggtgatatcggtgctgctatccaacattatgttgaagatgaaaatcattacggtgatgtacgtgaattaattggccacggtattcaaccatcaattcatgaagatccagaagttcctcactggggcaaggcaggtcatggtcttcgcttgcgtgaaggcatgactattacttgtgaacctatggtagaagctggtggcgactggcacatcgaccaacgtactgttgatgatcctaacgatgattgggtttactacgcaactccagatggttctaatgctgctcaatttgaacacacctttgcaattacaaaagatggtcctaagatcttgaccctgcagcatccttacgatggcttagaaaagtacatccctcactttgatgagatggatgattaggataatggatgaaaaatggtaaaaaccattttggtttaaaaattgggcaatttatttctacattacgaaccaccttatctcaaggagagatatttgctagttcaattattattgcctactacattttgttttctatttttccgattattattatcattggtaacgtgttaccgttgtttcacattgatactgcgcctattgctgaatatttgaacttggtttttccagaccaagtgtcaaaattcattatgccaattataaattctttattgaaaacgacatcaacaggctatatttcttttggtattgtgtttgcagtttggtcattatcaaatatggttaatgcaattcgtcttggagaaaatagactttatggggttcatcaagttgaattaaaattatcaatgcttaattttctttggactagaactattacttttgtttttacaggattgatgattctagtatttacaattgctacattggccttggtttttgggcaacaagtactcaactttttaggaccgatttttcagctaccacttaatgaaattagcaaaatctttagttatcgctatccagtattaatattggttatgatgctagcattatggtatttgaactatgttttgcctaatataaaactcaaaaagagagtaatttggccaggagtttttgtaactgttgtaggctggttagccctatcatttctttttagtttctatttacaccatttcccgattacttgggagaattatggcattgttggtacgtttatcatctttatgctctggttgaatattgcagcagtattatttttatttggcgttggtgttaacgctgctattgtgcgaaaccgtgttggacaagttgaatattctgctggtcgtattgccagttatattcaaaagaaaagacgaaaaactaagtagctgaaaaatgcatattttgttatgatgaacttataaaattgaaatagaaagtgtgcttttatgaaagtaagaaaagccgttatcccatcagctggtttgggtactagatttttacctgcaactaaggctttacctaaggaaatgttacctatcgttgataaaccaacaattcagtttatcgttgaagaggctaaaaagtcaggaatcgaagatattttaattgtaattggcaagaacaaacgcccaattgaagatcactttgattctaatccagaactagaacaagatttggaagaaaagggtaaaaaagaattgcttcgcctaaccgaaggaattactgatttaggcgttaacttgtattacactcgtcaaccgcatccagcaggtttaggagacgccatcttccgtgctcgcagttttgttggggatgaaccatttgtagttatgttgggcgacgacttaatggaagataaggtgccattgaccaagcaattgatcgatcgctataacaagacgcatgcttctacaattgcagttatgcctgtgccacatgaagaagtttctaagtatggtgtcatcgaaccggaaaatgagatcatgccaggactgatcaatgttaagtcattcgttgaaaagcctgatattgataaagcacctagtgattatgccattattggtcgttacttattaacacctgaaatttttgatattttggctaaccaaaaaccaggtcgtggcggtgaaattcaattgactgatgcgattgatacaatgaacaagactcaacgtgtctttgctcatgcctttaaaggcgaacgtcatgatgttggtaacaaagaaggctaccttgaaacttcaattgaatatggtttgaagcacccagaaattaaggaacaattgcgggcatatatcatgcaattgagcaagaagtttgaagctgaaggtaagcaaaataaaaaataagcttaattattagggagactacgctgcggcgtagtctttttatgtttttcttaatatttttttgctattatcatatttgttaaaaaatacacattatggagaatggagagaaaatatatgaaggacatttatattgttgcagctaaaagaacaccttttggcaagtaccgaggattttttaaggatgcttctgcaattgatttgggtgtaatggccttgaaaggaacaatgaaggcgggcaatattaagccagctgatgttcaagcactgtttatggggaatgttttggataccggcttaggtgagaatatggctcgccaagttgccttacattcagggatgagtgaagcttctgcagccgttacaattaatgaagtctgcggctcaagtctgaaagctttacgtctagctcaaggacagatggaactaggcgatttggatctagtagctgtcggcggtagtgagagcatgactaatgcgccttattttgttaaaaaagaaaacaaaaatgatccagcagatcacctagtaagtactatgcttaacgatggtttgatggatgctttttctggcaagcatatgggaattactgccgaaaacgtagcagaaaaatatcatgttagtcgtcaggatatggatgaatttgcattgcagtcgcataaaaaggcagctgcagcagttaaatccggattttttgataatgagatcctggatgtggagattgatggtcaaagtttagatcatgatgaaccaattcgtccggatacaacgcttgaggcattgagtaacttaaagcctgtttttaaggcggatggtgaagtgactgccggaaactcgtctcctttgactgatggtgcaagtatgttagttctggcaactaaggagaaaatgaaagagttaggcttaacgcaaattgccaagttaggtgaatttgcggaagctggctttgatcctgcactgatgggttatactccatattatgcagttaaaaaactgcttaagaagacggggcgtaattttgatgactatgatattatcgaattaaatgaagcctttgcagcccaaagtgtagcggtagctcgcgacttacaaattccaactgataaattgaatattatgggtggcgcaatcgcgttaggtcatcctttaggtgcaacgggtacacgcttagttgctagtgcaattagtggattaaagaagagaaaaggcagacgtgccctggttactttgtgtattggtggcggtcaggcgattgcttatgaaatcgagaatgcagaatgaaattttatcaattagagcctgaagctagacgtaaattattgcaggatgaaggtattgcattagagcaaatcgatgatgcggttctgagacgtctagatgaattgagtgaaaatgttgtagggcagttgcgtttgcctttaggcgtagtacaaaacttaatagtcaatggacaaaaatattgggtgccaatggctgttgaagaaccctcagtagttgctgccgccaatcatggagctagtatctttgctagaaatggtggtgtgacagctagcagcgaccgacaagggatttatggtcaaatcgttttgaaggtcaacaattctttttcattaattgaattagaaaaagaatttccgcacttagtcgaattagctaatcaaaagttttccagcttagtccgtcatggtggtggtactagaaaaataactgctgtgcagaaagaggatttgctttacttaaaagtattggttgatccagctgaggcgatgggcgcgaataaaaccaactcgattttggaatttttagcggctaaattagaaaattatgctggtgttgatgaaaaattatttgcgattttatcaaattatcctagccaattggccacggctaaagtgaagattgatccacaaacgattggtgggatgcaagttgcacaacgtgttgctctattaggaaaaattggaattgacgatccttatcgtgcggtaactaacaataagggaatcatgaatggagccgacgccgtcttaatcgccacaggcaatgattatcgggcaattgaagcagccactgcagttttagccaatcatgatggccaatatcgcagtttatcaaagtggacgatgcagggtagttatttagttggcgaattaacgttgccaatggcgatcggagtagttggtggctcaattaaggcccgtcatgacgtccaacaaagttttgctattttaggacaaaaaatcacgagtaaaactctagctgagattattgttagcgtggctttagccaacaacctagcagctttgctggcaatttctactgttggcattcaagcaggacatatgaaactgcaggcgagaaatgtggttgctgagttaaccgataatgaacatgagcgcaagcagctactagctgcgatgattagtgaaaaaaattattctgaaagtcatgctaaggagcttttagcaaaaataatgcaagtaggtattgatcaaattggactttttacgccagacaagtacgttgatatggtcgatttggcgaacgcaagaaagcaagatcaaaataagtttttagttggcattggtcaaagagagatgagtgttgcggatattacgcaagatgcagtttcaatgggaattaatgcgactttaaagtttattgacaagattgataagaacaaagttggtctattaatttttgggactgaaagtagtattgatcaatcaaagtcagcttctttatttgtaaaaacagccttaaagttgaagccagaagtaagaacttttgaagtaaaggaagcttgctttggtttaacggcatccttaatgatggcacgtgattttgttcgggtacatcctgaacaaaccgcaattgtcatcggtagtgatattgctcgctatggtgttaatactgctggtgaggtaacacaaggagccggtagcgtggcaatgctcatcaaagctgacccaagcattttagccctaaataatggtcattcagcttacagcgaagatattaacgacttctggagaccaaattattctcgcaccgctttagttgacggcaagtattcgactcaagtttacttggatttcttcaagaagacctttactgattataagaagcaaaaaggattaaagactagtgattttgatgcaattacttatcatttaccttttactaagatgggcttaaaagctaataatattgcgattgaggggcaagatcaagcaacaatgatcaagttggagcgtagttttgcggctgctaaacaattatcaagccgagtaggtaatatctacaccgcttcactttatatgagtttacttagtttgctagagaatggtgaattacctgctggctcattaattggcctgttttcatatggttcaggtgcaatggctgagttttatagtggcaagttggttgaaggatatgaaaaacaagttgatcctacagctgatcaagcaatgcttgatcggcggaagaagctgacagttaagcaatatgaagacgtcttcaatacggctttgttagatcctgaggatggcttagaattaactagcgacgatgaagtaggtacttggtattttgctggtactaaggatcatattcgtcaataccgcgtaaaagaataagaaagtgtctgggaaaaaactagcttccagatgaataaaaacgatcaagatttccttttttaagaatcttgatcgtttttttgttctctttaaaatttttaacaataaaaatcggcccttcagccaccttctttgacaatatttgttcaaattcatcatcataaaggcaattccgatatcggtttcgaccttctctttacctcgcaggtgcgttctgcgcatgccaaatacgttcttcaaatgtccgaaaactggctctacatcatattttctcatgccatagatgtgtctgccttcttcgctttggagaacttcttttgctttttcttttaaatattgccagttaggattatagcgaacttggcgctggcggccgctagctgttttagccaattgttccaattctggcgttagctggaactcgtctgcctcataaaccttaaaatcacggacctgaccagtagaacgatccttgcgctggctgtaatatttgaaattgaatctgacgccatgatgatcaatgtaataatcatctttttcattgtagtaccagttgattagcttagttggatcattcttatactttttggtctgttctttttcatacatagtgtagggaataaagtacttcttgtctggatatttttcctccagcatcgaataattgtattcactgccatagccagcatcggcgacgattttgtcaaacttgtccaacacggtcatttgatccaaaaccggctccaaagttttgaaatctgtcggattaggaaagatggcataatcaactacatattgatcggtcgtgactgcttgaatattgtagccaggctttaattgaccatttttcatgtggtcttccttcatatgcataaaggtggcgtcatgatctgttttggaataactgttgcgtccggcaaagatctcttcggcttcttcatatttttgcattcttggcacataatcttttcttagccggtgcagaatcttttttagtccacgtcgcttggcttttcgaggtgaaccgccaggaatggctttgttttcctgctcaatctctttagtcagcttgttaatttctgcttcagtttcttgagctaattcctttagcccctgactagtttgaactttttctttttccatttctttgactacttctttagtaatcaattcatcataaagttcaactgcctggcctttcagcttttcatgatacttttcaaccgctttgcgccagacaaatgtatagcggttagcatcagcttcaatcttagtaccatcgataaaagcagcaccttcattgattaagccttcatcttctaacaggttagtgaagtagataaagctctttttaatcagttcattggcatggctgcttgatctaaaattattgatagtatgatatgaaatcttttgctggtcagccaagatcatcattggcagattttcttccagcatcaactcaatctttctgccagaaaaaactcttctggagtaagcaaaaagcagtattttgagcatcatggctggatgataggctgggcggcccgttttagcagtcttgcctactaaaacatcttctggaattgaatctacaaaccagctgatgacattagccaaatgattggccggaatggcaaaatctagattaagtgttaaagcagtttgacctgtgatataattcttgtacatgttagtttccaccttttttattttgtgatgatttaataatatcaaggctggagctaaaagtatacaaaaagagcgttgaaacaaaaattcaacgttcttttttcatgatctgagacttagttttttcccagacactttttacattaaaattgcttgtccagtatcttcgcgaatctgtaggccgaaaatggaatattctttttggtcaatgaccattaacaaggggatgccgcgaccacgcatgcggccaactaatttaatcaatttttgtttggtcattgctgtttgcccgggtagcagcagacattttccttcggcaatagtgagttttccccacttaagtagtttgtcatcatgctttagataaaatttagtattcaggttcaggtcatcgattaattgaagcaagtctgttaagcgcatttttcagtataattaagtcataaggattgtaaattttcagcaatttaattataaaatgaaaagtgaaataattgaatttggaagtgttaaaagatgaaaaagaaactattattgtcttccgcattaattgctggagctggcttgtttgcggcaagcgagtactttttcaagatggcgatgacaccgtttaataaaaaagctgactccaaagaattcaatgtcattaagttaagacattgacaattaagggtgcttttttagagatcgaatcatttggattcgatctctttttttgtataaaataaaggcgaaaagaccagccttttcgcctatcttatatattatatattttaaaccttcaaaattattgccagaaagatggtgttaattatgaaagcccttcataagaatattctagaacgtcttgatcaaattatcaataatactggggatcatattcacgattttattaataatcctcatgcttttaccaggaaacgcactttagatgcagcgacagtccttaaaactacaattaacatgcaaggtcagaatttaaacagtgaactctttagagcttttggcgaagatgcaactaaaaagaacgataaagtagttagtacttctgcctatgttcaacgcaaaagccagctttctcctgcttgttttaaacatattctgactgtttttaatcaaaatctatttaatattcaactttttgatcatcactaccgtttgtttgccattgatggctctgactttaatcaaatctggaatccgaaatcgaataacattgtacaagcttcttctcataaaaagaaaccctattgtcaaattcacgttaatgccttatatgatctattgaataatacctaccaggattgtatttttcagcctaaatcagaaatggatgaacgcaaagcggctgttcaaatgcttaaagctttgaattgtggtccatatattgtaacaatggatcgtggctacactagtttcaatatgattgaaaactgcaatcgcctgcctaactgtcattacataatacgaactaaggctggacaaggcggagttaaagaaataacgacattgcctgatcaagaatgtgatcgtgagatttcctgcctggtaactacttctaactattactacatcacgcataaagccagtgagaatattcaccatgtccagcatcattatcgccaatatattaagtatcgctctaaaaatacccaggatctaagctgggattttggcgagttatgcacaataaaatttcgagcctgcaaatttagaattaatgatgccaaatcaggcaaagaagaatgggaagttgtgctaaccaatcttgatcgaaaaaattatccgctaaaaagaattaaagagctttatcatctgcgttggggtattgagacctccttcaagaaattgaagtattctttaggcagtgtacagttccattccaaacaagataaatttattgaaatggaaatttatgcccatatgattatgtttaatgcaatcagtcaaattgatgcacaggcctatattccgcaaaagcattgcaagtatcaatatgccatcaatttcaagcaatcatgcttgattattcagagcatgtatttggcttcttctttaacgcaagattttgaacggatccttattcagatcagctattataccattccaattagaccaggccgcaaggacaagagaaatattaagcccaaatcagctgtatattatttatatcgcgtagcttaaaaaagcagaatctgtgctatgccttatttgttgtacgaaaaaagcaccaatttaaccaattaaatgttaaatcagtgctttaaaagtctaatattaattgtcaatgtcttaacttaatgacattgccaaagaattatcaggcaaggatccactttatcgtgataaggtttggtttagagatttttctaagaaaacatggactttaaaaactgatagcggcataactttgttcgcccagtaccttgataaacatgccaaaaaaccgcaattttattacatggctttatgagtgatggagatagtatggctggttttgccaaaatgttttatgattttggttataatgttctcgttccagacgcacgtgcccaagggcgcagcgaaggtaagtatatcggctatggctgggctgaaaaagatgatattttgcgttggatctatcaagtaattgatcaaactggtacaaatgccaaaattgtaattatgggtcaaagcatgggtggtgcaacggcaatgatggtaagcggtatgcttttgccaccacaagtgaaagcttttattgaagattgtggttattcaaccgtgaaaggtgaaattaactatcaagctcaaaatttatttcatatgaaggcttttccacggtttccaatagttgatttggttagtggaattaatagagtgaaaaatggcttttatttaaaagatgcttctgcggttgctcagttaaataaaaatacgcgaccatttttatttattcatggcggcaaggatcactttgtgccaactaagatggtctggcaaaattatgcggcaacagctgctcaaaagcaaatttggcttgcgccacttgcagggcatgctttgtcttatccaatgtatccaaagcaatatcgacaacaagtagaaagatttttgcaaaaatatatgggttagttcttgtaaacggtttcacaactagatataatgaatagtgtggaagaggtagaaataaaagttaacaactataaaaaaatataagtaagtttttatctccagaattgtattattattggaaacttgaaagattctctatacgtagaggtgtcagccataaatagcttaattaaaaattatttgattaattatcattggctgttcgcaaaaactccaatttattaaaagttacattttatgtaaagacccgaacaagtgaatgttaatattggttgcgataatgccattgtttaaatacataccaaacaactaaaaatcgtgactatcaattgatgagctacctcatccacttgaaattgcggctactaagggacaggattgtccagtagccgcttttttatatacaaaaacaacctagcccaagactaggttgttggatttatctatcttttctgagcactaacttagcaattgcctcacagcgtggggtttgtggtaacatgtctacattttggatgacccgaacatcatatgcctcgctaagtaaaactaagtcttgagctaaggttgagggattacatgagatgtagacaaaagtttcaggtttaacccgcaagagggttttgatcaagcttttagctaagcccattcttggtgggtctacgattaaagcattgattgcaacaccactattttgtaattctggcaaaaccttttcaacactgccttgaatataatcagcgtttttgatgtggttaagctcgacattatgttgtgcgtctttgactgcctctggaatggtttcgattccaacaacttgcttaacgcggtcagctgccaaaatacctaaggtaccaacaccactataggcatcaatcaaggtttgatcgggggttaggtctaagtatttcaatgcttctgagtaaagattgatggtttgaactgggttcaattggaagaaggcacgtggtgataaggcgaattttttacctaagatttcttcggtgatttgattcttgcccaaaagcttttcggttttatttccccaaacttgtggattctgccattcggtttcattctgatagacagaaactacatgatcaagtttcataatttctttagcaagagggattaagttcttaatcttgtggccgatcgaaatcaaggttacctggatttccttagttgcttctgattgacggacaactacggtcttaatgccaggtaaatgacgacgatagttggcaacaggaacatgcaatttttcaattaaaaccttgattttacgttccgttttttgtgtatcttcactttgagttggcatctttggtaagtcaatcaagcggtgggaatttggagcaaaaagtccaagcttaagttgaccatgatctttttcaatttgatattgagccttgttgcgataatgccatgggtcaggagcagcgatagtatttttaactttatacttattgtaattacgaggatggtacttgcgtaatgattcaagcatattgttcttcttgaattcaagttgtttgtcgtaagacaagtgcactaattctaagccaccaatctcgggatcaacaccttcagggaagtctacgcgatctggacttttttctttaattctaaccagttcgccttggatgtagtgtggatatgatttaacaatcttggcaactactacttcgtctggcaaggcaccaggaatgaagataatctttttcttgtagtaaccaattccttcaccattaattcctaaacgtttaatagtgatgatgacgtctttttcatgttttggtttattatgggtaaattttctgttcatcgttaattctttctactaaaaactaaattgtgttcaattaattgtactacctggaaaaagttcttagcaagctttagcaaaatttgctagcatggatgtagaaaaatatgcgaggtgaaacaagttgatcataaccaaagtaagtgcacaaaaacggccaggtcgctataatgtttttattgatggaaaatatgctttttctgccggagagaaaacgttggcagaatttgtgctgcttaaaggtaaagaattaaatgatgagcaggttgaaaagattaggcaatttgatgctgatgctaaggctagtgatttagcggctcattttttgagttacgagcctcggaccatctttgaggtgctgcaatatttaaaaaaacacgaaatctctgatgaagcagccaatagtgctgttagtcaattgaatgaattaggctatcttgatgatcgtcaatatgccaagctgtttatcaaaaatgatttgcgtgttggctctgatggccctaaaattttattacgaaagttgacgcaaaaaggcgttgatcctgaaattagtcaggataagttagatgaaattgatgaagaagattggctcgaagtgggccaacgcgtgattaagtcgatgagccatcaagttggcaagatttcacaacgtgaattagagcgtaagatgcgtactaaattattaacgcatggctttgatagcgggattagtaacgttattattgatgcaatggatcttaaagaagatgagaatgcacaaacagaagctttgaagaaacaaggaattaaggcttacaagcgttttagaaatcttccagaaattgaacgcaattttaaaataaaaaaatatttgtttagtcacggtttttcatcaggtgagattgatgcctttttaaacggtgaaataattgatttagacgaattagtagaatattaggagaaaaaatgaagaaaaatattgaatcaagattatttattggtcgtccatttccagctggtttgatgaatgctcaaaagagctttatggaagctaatcagcaaatggaaaatgatgaaacttttcaaaaatttttagctgatcataatttagaaaataagcgttctgtcctagtggtatcaggtgaggacagctttatgtattggtatggcgttttagcagatgtagcaaaagatgaagtgccaacgggtttaatgaagtttgaattaccagctgcagaggtagcggaggaagtagaagagaatcaaactttagtctttttcaacttaccgttgactagtaccgtgccaaattttgccaaaaaagtagttgctagcggaattgaagtacatgaaaatttgggtgacagtgacacgccatatattacttgggatcttgacatggatacaaaaaaactggcccaagtaatgtacttgaaggccagcaagtaattaatgctgctcagggtcgattgacaggttatcgtattcaacataagcgccaagacaagttgaaacaaacatgattaacaaaacaaagccgatggagccgcctacgatttgatcaagtgttaaaagagcacgtattatgtaggtagcagcaaagcaaagaacaaagtctaagataatattagctgctaaaagccagtagcgccgtctgatactgaagaaacgtaaaagctgcttcagtaagccatcgttggtttgaacagctaataaatcaacaggccgttgaatagtagccttgacagcaaacataatgattgcgccaactaatgagccgattaatgtgcgataaagttcagctgaatgtaaaactaatgcattatagccgattccaataatagctaagctacagatatagggaattagcaaaagaaatgtaaaaacgagtaagacatgactttttttcatgacgaacctcctagtcttatgtgctattttaacataattgttattggctctatgctataatagctatatttagataacttttttaagaaagagagtacgaaaatgaatagtgatcctggagcgggaactctgtttggtcgcttaaaaaatagattatccggcgataaaaaagtggggactaaagatcatttagaaaaagaaattgttactttacatgaaagtcataaaattgatgatacagaattttcaatgctagaaggtattttggactttcagggtaagacagcccgtgaagtaatggtacctagaacggatgctttcatggttgatcgagaagtcagttttcaagacaatctagatgaaatccttcgtgagccatattctagaattcccgtttatcaacgtgataaggataagattgtagggattattcatatcagaacggttttacgaaaggctaaacaaaagggttttgataatcttgactataaagatgtcatgactgagccgctgtttgcaccagaaactgccgagctgggcgatttgttgatggaaatgcagcaaacgcaacgacaattagcaattttgacagatgaatatggcggtgtaactggattagctacaattgaagatttggttgaagagattgtgggcgatattgatgatgaggttgatcacactgagattctttttaatcaaatagctacaaataagtacattatttacggtaagatgccattagatgattttaatgagcaatttggtactaatcttcaaatggaagatgttgatacgatagcaggctatgtgatcaatactttaaaagtgattccagctaagggagaaaagttaacagttgatattggtgatgggatgactttgaccactagaaggatgaaggggtcacgcttgttgacggtattattaacgattgatgaatcaaaaaaggaagaagatagcgaggactaatggacaaagagttagcagataaagtaaaaaagagaagaacatttgcaattatttctcaccccgatgcaggtaagacaacgattactgaacaaatgcttttgtttggtggggtaattcgtaaagcaggtacggttaaggcacgtaaaactggcaattttgctactagtgactggatggaaatcgaaaagaagcgtgggatttctgttactagttcggttatgcagtttgaatatcaaggcaaacgtatcaatattttggatacgccaggacaccaggacttctcagaagatacttaccgtacattaatggccgttgactcagctgtcatggtaattgactctgctaaaggtatcgagccacagacaaagaagttgtttaaggttgttaagcaacgtggtattccaattttcacgtttatgaacaagcttgatcgtgatggacgtccaccattagatttaattgcggaattggaagatttgcttggtatcgagggtgtagcaatggactggccaattggttcaggtcaaactttaaagggtctatatgacatcgctaataatcgtgttgagctttaccgcaaaaatgatcaagatcgctttttaccattagatcaagatggtaagttgcctgatagtgagccacttagtcaagatcctcaattccaggatactctggatgaaattgatttgattaaagaagctgggaacaagtttgaccgcgagaagattgctatgggtgatcaaactcctgtcttctttggctcagctttgaccaattttggggttgagacattcttgaacagctttgttgatttggctccagcaccagagagtcacacagttaatggggatgaggagctaagtccagaagatccagaattttcaggctttgtcttcaagattcaggctaatatgaatcctcatcaccgtgaccgaatcgcctttgttagagtcggttctggtgaattcaagaaaggcttggacgtaactttagctagaactgataagccaattcgtttaaataatgcgactgaattcatgtcaagcgagcgagtacaagtttctgatgcggtagctggcgatatagttggcttatacgatactggtaattttcaaattggtgacagtatttatgctggtaagcgcaagattgtttatccaccattaccagaatttacacctgaattatttatgcgagtaactgctaagaacgtgatgaagcaaaaatcattccataaggggatgaaccagctagtccaagaaggtgcaattcagctttaccgcaattatcaaacggatgagtatattcttggtgctgttggtcaattgcagtttgaagtgttccaattcagaatgaagaatgaatataattctgaagttgaaatgaacagtattggtcatcgtgttgcgcgctggattgatccggaacagcttgacccacgcatgtctaatactcgtaacttattagttaaggaccgttatggtaatccattattcttatttgaaaatgaatttgcggaacgtttcttccatgacaaatatccagatgttgaattaacagaaaaactttaaagcaaaaagaaaaaggagaattgaatgaatcaatcctccttttttgatacaacaatatttggattacttgtcaacgtgaatttcgattacatgacgactcttgtctacagtcaaagtgtatgaagaatcataatctttaattaaacgcttgattacgaattcaatctcatcttcgcgaacacgacggtcatggttttcaagtgcaataccgatagaatccttactttcagtataaataactgaagtattaccaagagaataaactttaacatagtttgcatcggtagtgttgagctgactgtgaaccaaatcagagtaattattggttacatcaattaaatgcatggaattcacctgtttctgttagctttacttcttctaatttagtatacctcaaattgagtagcatatttttatttttaagaaaaaagatttcgaatattgcttcgaaatcttttggtataacttggactttgtcttttattaaatcctattcattatttgcttcatcactgattacaattttaccatcaacaacatcggcttttaaattcttagcctgtgcatgatcaagtttgaaatcagccacattatcctcaatctcttcttggatggtacgacgaagaggacgagcacctaaggcaggattaaagccatcttcaactaatttatcttttgcagcagcagttacatcaatgtgtaggccttgatccttaaccatattgttggtattttgcaacattaagtcaacaatcttaagcaagtctggcttagtcaattcattaaattcgattacatcatcaagacggttcaaaaattctggcttaaagaattggctcatattatttctagcagattcattagcttcatcttcgttttctgctgtaaagccaacgctagcgttcttaatgccttgtcctgcattagaagtcataataatgatggtatccttgaatgaaactgttctaccttgtgagtcagttaaacgaccatcgtcaagaatttgcaagaagaggttcaaaacatctgggtgagctttttcaatttcatcaagcaagatcaaactatatgggttgtgtctaacttgttcagttaattgaccagcttcttcgtagcctacgtaacctggagcagaaccaattaatttggaaactgagtattgttccatgtattcagacatatcgaaacgaatcattgcatcttctgagccaaacatttgcttagccagttgcttagctaactcagttttaccgacaccagttggaccaacgaagaggaatgaaccaattggacggcctgacttgttgaaaccgattcggttacgacgaatggcacgagctactttttcaacagccttgtcttggccgataacgtgagcctttaaatcagcagctagattttgcagttggttttcttcttgcttttgaatatcaccaacaggaatgcctgttttttcttctacgatcttgtccatgatcttatcagtaataacaggggacttgtcaggatctaccttttgatctttaaccttttcatatttttcaatttgatcacggtagtaggctgctttttcgtaatcttcgttttttaaggcttcttccttcaattgctctgcggcattaattctttcttgcattttatccttatcaatataaggaatggttaagttcattctagaacctgcttcatcaagaaggtcaatagccttgtctggtaaaaatctatcttgaatataacgtgctgaaagttttgcggcagcttcaatggcttcatcagtgtagtgaacatggtgatagtcttcgtagcgtttttgaataccttttaagatgcgaattgtttcgtcaattgaaggttctttaacttcaactggttgaaaacgtctagctaaagcagagtctttttcaatatcgcggtattctttgatggtagtagcaccaactaattgcaattcgccacgagccaaagctggcttaataatgttaccggcatccatgccaccttcagcattaccggcaccaacgatttcgtgaatttcatcaataaaaagaatgatatcgtcgttttgttgtaattctttaattaattgttccattctttgttcaaattgaccacgaataccggtaccttgaacaagtgaaacaacatttaatgaaataattcgtttgttctgcaattttgctggtactgatccatctacgatttcttgagctaagccttcgacaacggcagtcttaccaacacctgcttcaccgattaaaacagggttgttcttagttcttctatttaaaatttcgataacccgagcaatctctttatcacgaccgattactgggtcaattttgccttttttagcaagggcagttaagtctgttccgtattggtcaagtaggcttctgccgttttgaccaccattaccagcgcctccccccatttgcattctagggtcgttatttctcatttcattattattgtttgcggcattgttgttatttccgtttaatgcgttgaataaatcatcaaagtcgccaaaaaattcattattattcatttttccttgatttccttgttgattttttaattcttgataacagtgttgacataaatctatttcgcggctttggccattaaccttagtgaaaaggtgaatagaagcgggccgctcatgacaattttggcaaagcaaaatatagtaccgcctttcttttcaactgtaccaaaattatattattagcactcttggtagtcaagtgctaagactcaaacacttattttttgtaagaaatacttttgttaccgcaaacaaaatattaatatttttgaaaattgaatataaatagtcatgtggtaataagtcaatgtaaaagttaaattttatttttaattagtttgttttaaaaccaaaatttgcgtgcatgaaactaagccctatttcaagggattttttaacaactattatttactcctccaaaaatgttttagaccaattaatcacctcggtgtttgatagatttgaccatttttgagcagagtgaaaatggtcctggttaattttcttgcacaaagaacgcaagcgcgtttatgcggagaatagaaagcttcatcgtatttcttttgatagtacttccgaaaaacgggatctctttgtctaatcaggttggcagcttcaaccaaataatatcttagataatgatttccgtttttagtcatcggtttgtgttcgctatcaaaattactagattgcttttgacgccaagctagaccagcgtatttagctagctgtgcttcagtgtcaaagcgatcaatactgccgatttcagcgataataccagcggaataaactgacccaattcctggaatagattgtagtattctctcttcaggaagcgtttggacgatatctgtaattgctttatctaagttcttaatcaatttctgattagttttaatttcggcatagtaaacagataatacggcatcaatcgagtctttcatgactttacctaagcgatatgatcctctaacggcttttctgatcgctttagctaaagtctctggatcagagaagcggccacgtcctttggtttgaaggtagtcaattagatcctcgattggcatttcagcgatttcatcgatggttttactatcagtaacaattgacagcatcgttgcgccaaagatagaagttttaatattgtctttgtcaacggtaactagtttgtttacacgataataaagagtttcaatgaagtgctgcttagctctagtgagcgaagatgtgatttcatatctagctctagttaaacgctgtaaagctaagtattcctcttgccgagcaatagtgacatggtatttaccaaagcgtaagtattcagcgatgtaataggcatcagtaggatcattcttattttcttcgtaaacgtcatgaaatcgtttagtgtttttaggattaatgacatcagtttcaagattaattttttgtaaatcttcgtcattggcaaagaaataagcagggtgaaagctatagattgaagtggcttccatgccgataattactttgtcatagctgttctgtttagcaagttgaagaattatctttttgacctcattagcaccaatcaggtcattagaaaaagattggttaagtaaaggtttttgataattttctgagtcagtaatagcgacttgaagatcttttgaactaacgtcaattccgataaaaagtttcattgagaatggcctcctttctagcaaatatttggtcatagatcgatcatcacatgttagtccctaattacagattctaagacaatctcgcaaaatataagtattcataggttcaagctaaaaagctgcgactgaatctgctctgaatcagtaatagccagaatcgatacagcatgtgagtaagtcattagtaaaactgcttgggcggcagactaaaaaagtagtcaaagctacagaaggaaacaacctataccaattgaccaaggtcaatgacaattagagactagcatctgatgatcgaataaacaaactaaaagaataatcattatcactgatttaatttatatgaaactgtcaaatcttttgtgtaaatagttctttctcgtaaattgattttttaattatttatttaatcaaagtaggattctaaggtgtcctgaacctgaccaaagcctttatgaattcgattgaaataacggtcattgtagctcattgcctgaatgccaataaaagcatcaagcgactgttcagttggaaactctgccttaggcttagctttgcgcttgatcacattgttaaatgattcaatcatgttagtcgaataaattgaagctctgatctgcttgggatagttataaaagaccagcagatctggttctatgtctttcaagcttctgataacatggctgtaaaccttgccccatttggtatagaagtcatgcaggacagctgtggcttcttctttgtttgtctgttgatgcacctgtttgaattcgttcatgatcttttcacgatcgtcgacgcgtactttagcgcagatattgcgcatgacatgaaccaaacagcgttgaaaatgagctttaggataagtcctggccaaggctgttttcatgccaacaacaccatcagaaagaaaaagctcaacttgctttaagcctcgggatttcatgttttgaagcatatctgtccagacttcaatgttctcgctaggtgcaatgcagtagtcaatgacctccttgtgcccattaggcttgatgccaatggcaatatagactgcttcacgctcaaatgtttctcggcgcaaaggaaggtatgtcgcatccaaatagacgcagaaaaacttgtcgcttagcttgcgtttgtggtaagcctcaacctttggaatcatctgcttggaaatatttgatacctgagctggactgtaatggctgccatacatcttttcaattagatcggctatttccctggtggtcacgcccttggagtaaagcttgataatcatgctttccaagatatccgagtgctgcttgtagtcaggcagcgtgtgctgatgaaattgaccgttgcgatcccgaggcacttgcacttcaattgggccaaattgcgtatcaactttgcggaaataagcaccatttctagagttgccagtattccagccatttctggcatagggatcatagcccagaaaggcagtcaattcagcttctaacaagttattaacagcctgttgtagctctttgcgcaataaatcatttattttgtctggattgaatagagcttgagcaaaatctttggtaaaatcattcatgaaggagttcttctttctgtatgtgtttttttgttcaaaccaatcatacgagaaaggaactcctttttctaatgtttaaagaaataaatttaaggaatcattcatccttacacaaaatattttacagtctcatttatataatacgatttaatttatataatacgagtagaattaatagtggaaaaattataaaattttaaaagagtggtgatatttttggattatcagaaaattctagatcaattagtctcaggcgagataaaagagtataaagttgagccaaaagatgcgtttgatcttcaaaagactattagaaattatggaaaaagacaatatattaccggtagggcagaaagaggcggcgcgattgtgtataccgctacgaataccgatgaataaataatgtaaactgttacattgcagttgtctaatctgtaaaaacatgataatctaatactcaaatgggtatttattaccagtttaatttttcaatttaaaggagatatttataatggaaaaacgcgattttcatatcattgcagaaacaggtattcatgcacgtccagctactcttttagtacaagctgcttcaaagtttggctcagatgttaacttggaatacaacggtaagtcagtaaacttgaagtcaatcatgggtgttatgtcacttggtgttggtcaaaatgctgatgttactatcactgctgaaggtgatgacgaaaaggacgcattggacgcaattgccgacactatgaaaaaagaaggtttagctgaataatgaccaagactttaaaaggaattgctgcaagtgatggtatcgctattgctccagcatatcttcttgtggagcctgatctttcattctctaaatcttcaattgctgatgttgaagctgaagtagctcgttacaacgatgcaattaagacttcaactgctgaagttgaaaagattcatgatattgctaaagaaagcttgggcgatgaagaagctcaagtttttgaagcacacttaatgattttaaatgacccagaatttactggtgccattgagaatgaaattaaggattcaaagatcaacgcagaagctgctcttgatgagactgctaagaagtttattgctatttttgaagggatgacagataatccttacatgcaagaacgtgctgctgacgtacgtgatgtttcaaagcgtattatggctcaccttcttggtaaggaattaccaaatcctgcttcaatcgatcatgaagtaattgttgtagctcacgacttaactccaagtgacactgctcaacttaacaaaaagtatgttaagggttttgttactgatattggtggtcgtacagctcactcagctattatggctcgttcacttgaattgccagctgttgttggtactgactcaattactaaggatgttaagaacggcgatatgttaattgctgatggtcttgacggggatgcaattattgatccaagtgacgctcaagtagctgattacaagcaaaagagtgaagcattcattaagcaaaaggcagaatgggctaagcttaagaatgaaccatcagttactgcagatggtaagaaatttatcattgctgctaacattggtacacctaatgatatgccaggtgtaaaggataatggtgcggaagccattggtttgtacagaacagagttcttgtacatggactctagtgactttccaactgaagaagctcaatttgatgcctacaaggaagttattgaaggtatgaatggtaagcaaaccattatcagaacctgtgatatcggtggtgacaagcaccttgattactgggatcttccagaagaaatgaacccattcttaggtgttcgtgctatccgtctttctatgcaatacaaggatatctttagaactcaattaagagctttacttcgtgcatctgcatacggtccattaggaattatgttcccaatgatcggtactttagcagaattacgtgaagctaagcaaattttagctgaagaaaaagataagctcgctaaagaaggcgttaagattggtgatgacttgcaagtcggtatgatgattgaagtacctgctgcagccgttttagctgatcaatttgcaaaggaagttgacttcttctcaattggtactaatgacttaattcaatatactatggctgctgaccgtggtaatgataatgtgtcatacttgtaccaaccatataacccatcagtacttcgtttgattaagcacactattgatggtgctcatgaaaacggtatttggtgtggtatgtgtggtgaagctgctggtgataacactatgttcccaatcttactttcaatgggacttgatgaatactcaatgagtgcaacttcaattttgcgtatcagaagcttaatgaagaaattgaacactgctgacattaaagaattagctaacgaagcttgttatgtatcagaaactgctgaagacaacgaaaaattagttaataatttaatgaaaaaattgaacaagtagttttaatttgcaaaaagagactgtgatgtctctttttttatttttaataattttaaacaaaacgaacgaaatcttcacaaataattcacgttttatctttagtattaagtaaatagcagaggtaaacgataaattaagcacttacgaaaaagaagcttatatggtatactagctatgagtaaagaaacgtatacaaatatttgttctgaggagcgtgatttttatggtagatttatatgtctctcctagttgtacttcatgtcgcaaggcaagagcgtggcttgaaaaacataatattccattcaaggaaagaaacattttttctgaaccattgactaaaaaagaatcattaaagatcttgcggatgactgaaaatggtactgaggaaatcatttctacccgctcaagagcttttcaacaattgcgaatcaatttagacgatttatcaattgatcagttacttgatttagtagaaaagaatcctagcttgttaagaagaccaatcattatggatgatcgtcgacttcaagttggttacaatgaagatgaaattcgtcgattcttgccacgaaaagttcgtcggttggaattggctgaagcacaaaagattgcagatttataaaatgattgaaaagtgttagttaaggcttttgttgagactaacacttttattttaaacgaaaaatacgctacaatagatatattaattcatggaggtgagatcctgtgcaggtagatcatattgataagaatactatcagagttcgaattgataaagctgaattggctcgtcgtgggatgggaatgcttgatttattaggtaatagacaaaagattcaagacttcttctataaaattcttgatgaggtcgatgaagaccatgaatttgccaatggtgatccagtatcatttcaagtaatgcctaataatgggggattagatttgatgatcaccaaagttaagccggacgatgcacagaatttaaggaaactaatgggtgatagctttcctaaggatgagcaatcatcaacgaattcggatgattcaaaaagtttctttgatttagatgaggagagtacgaattcaaattcggctcctcaaggaccagctactcacaacttttttaaccaagatgataaaaacaatgagccaactgattggagatcgcgcaagactcaggcttactattttgatgatttaggtagtctaattgaattagctgataaccttaaggcaaatgatttagcttctagcttgtattacttgcatggacaatatttcttaaatttggcatttcttgatgaagaatatgaggagcttaaaccagcagatgcgtggacaatagccaacgaatttggttttaaggtcgatagtgataagatgcgtgtagttgaagaaacaggcaaatgcttattgatgcaaaatgctttaggccagattcgacattactttttaaaagcagctaattattaagattctttaaagaaaaagagacgggacaaaattccgtctcttttttacgtaataaaacatgggtgagaaaaatgtatgcagccatgttaaataagaaattagtccttgcagttgacgaagcatgtttagttaatgcaaggcaaaagaaattgaatcgtgataattatcactgtccacattgcaataaaaaagtaattttggttatgtcggagcaaaaagcagccttttttaagcatcttgtgaagtacagtaacttaatgggtgaaaaagaggagcatcaccaatcgaaaatgctgttgaagtcagctttgacggcagctggttttccggcagaagttgagattccattagctgaaggacaattgcgtgcagatgtcttagcaactgctaagttagcgtttgaagttcaatgtgcgccgttgagtcaacaagaatttaaccatcggcatcagctttatcaaaaaattggtgtaaaagatatttggattgtgggacagcgacactatttgaaacggcgattgaaacgcacacagttgattttctttcgacaaaataaagcttgggggaattactatttagaaattaatccacagagaaatcgtttttgcttaaaatataatgttttcgaagaaccggtagctaataaattggtttatcaaagtaaatcatttgtccttgatgaattggggataaaagatttttggcgctttaagccattcaaaaaagaatattctttgaacattgcaactcaaagaaaatatttacgccagcaaattatgcaaaaaaaaagttaggattgaaaataggagagatgctttatgaacgcaaattaactcttgatgatttacctgataaagtttttgctacttggcgtaacccaggtgaaagagatcgggttagtgattttttgcaaaaataaaacgcctttagataaggcgtaaatgatgctccgcaggtaaatagtctgaaaaacacttttgacaatctggaagcattagattaactaaatcctgttgattgattggtccctctagcaatactccattttgctcgttgtcttcgttaaagataacggtggtaggagtagctttaatattccattggttggctagtttttgatcttcttcaatagaagtacgcaggtaatcagtttgtttgattgcctgaatatccgcatccttgatatgtaatttgtttgcgatccgcttaagcagctcaggtgtataagctgaagcatctttgctcaagtttttttgtaattcatacaggtattgacgggcttttttgttgccataggccagcctaatcgcgtggtaattttctaatgcttcataagttgctctagaaaaattactaatatcaggcaacttctggtcatctttgcgtcggcgaatcgcatcatcattgattaaacaaacatttgcaatgggaatatagtgataacaaacgtcgacccctaattcatcaacggttttacgaatctgtttttcagtgtcataacaataaatccctattggattgatgaatagaaaaatctcaaacataatctcgacctctttggtgatttactattagttactttagcaagaaaaaaaataagtgacaaaaaatatgccttattttctatatactatttttggtgagcgcttgcacgagctattttgctttgattagtgttagcagccgtttgttcaaagtcatattcttgttcaagtttagttaatactgtttgaattaaagcaggattagtattttcgatttctaattcaaaatcttgatagttatctggataagacgtagcatctagagttaattcacagttttgtggcccgttcatcaaaattctgcgggttttgctccaggtgaaaagatgtagctttttttggtcattggcaaaatgattatctagatatgcgccaatattaccagtgaatttaaaatgcttttttgctactaattttttagcttgagcgtgagttaattcatcattaatttcaattacttcatggaaattcttttgtacaggattaggatccggtaccttcattgtttgctctgcgtgagtagcatagattcgaatacgcaagctaatttgatgattttttaataaatcatctgctgtatcaaaataataattttcttgggtaaagtcacttttgattggaaaagcggcagtgatctgatcataaacgcttttatttaaaagagtttttgcttcaatttctcgatttttactcatctgtttttcctccgaactgtttaacttaattatatggtaaaatgagtttgtttgcttaagaaaggaatgttttctcatggaattagattgggataacttcttgtggccttataacgaagctgttcgcgagttaaaggttaaatttcgttcccttagacaaggctttttaactaagggagaacattcacctattgaatttgtaattggccgggtaaagacagttgattctatcaaggaaaaaatgaaacggcgagtaattagtcctgatgtcattgagactgatatgcaagatattgcagggattaggattgttactcaatttgtagacgatatttataaggtagtagatttgattcatgctcgagatgatatggaagttgttgaggagcgtgattatattcaaaatgctaagccgagtggatatcggtcataccacatggtgattaactatacggtttacttaccagaaggtccgaaaaaattaattgcggaagttcagattagaactatggcaatgaacttttgggctactgtcgaacatactttaaattacaaatatcaaggtgtctatcctgatgacatttcagctagattaaaatcaacggctgaagccgcttatagactagacgaagaaatgtcgtcaattaaggatgaggtccaagaagctcagaaaatttttaccaaaaataagggcaaagaaaaattatgaaagtaacaatagcgcataataactatgatgaaacattaaagacagttgcgcagcttaagaagctgcttcaggaaaaaggttttatctttgatgctagatatcctgatgtagtgatcactgttggcggtgatggcaccctcatcaatgccttccaccgctatgaaaatcaagtagattctgtgcgctttattgggattcatactggccacttaggtttttatactgattggcgtaactatgatattgaaaaaatggttgatgctttagcagtaaccaagggtgaaccagcgaagtatcctttactagaaataaagatgctcactgaatcaggtgaaactcattaccatttagccgtcaatgaatcagcggttaaaagagtttcacatacattagaggccgatgtgtacattaatgatcaattatttgaaaactttcgaggcgatggtctttgcgtttcaacaccaacaggttcgactgcttatggcaaatcactaggtggtgcagtaattcatccccggctaaaagcgttgcaaatgactgaaattgcctcaattaataatcgagtttttagaactttgtcatcaccaattgtgattgcgcctgatcaatggatttcgattgttcctaatgcagatcattttgtgatgacagttgatggagcaagaattgatgtacgtaatgctaagaagattgaatatcgaatttcgcggcattcgattcagtttgatcaatttggccaccatcatttttggtcacgcgtacaaaatgcgtttattggagataatgaaaaaaatgactagtttatttaaactaattgtgcaagaaagagaccccaaaaagctgggtccttttttgttaaaaaatggtttttcgcatcaagcgttaaacaatgctaaacaccatcatggcatgattttagtaaatcataaaagaagatatactagctttaatttgcgtgctggggatgaagtgatttttatcagtggtgaagaaaagaaaaatgattttttaaagccatcgaataatccagtatcaattgtgttggagaataaaaattatcttgtagttaacaaacctgcaggtgtgttgtcaattccctcacgctatgaagatgatgatgcggtggtcaatcgattgttgggttattttgcccaaaaaggacagaaaaatttgaagccgcatgttattactagattagatcgagatacatctggtttagtattggtggggaaaaatgcaatttcccatgctcgttttagtaaaattggcaaggagaaatttgtcaaaaaatatcatgcaattgtacatggcaattttgctccgaatgagttaactggtttaattgatcaaccgattggcaaaaagggtagtggagttaaacgtgcagtagtggcagatggaaaggacgctcaaaccgcgtatcgagtcctagatcaggttacaggtgctagcttggtagagttacgcttgcttaccggtagaacccatcagatccgtgttcacatggcttatctgggacaccccttatatggtgatcctttatatggaattcaagatgggttttcacgccaagccttaaattgcttttatttaaattttccggatccatttagccagcaaaaatgtaaaacaattgagttgaatgatccaaaagatatgcaagaactgtggcagaaactaattaataaagaattctaaagttattagctaaaacttctaaaaaactcgcatctagtaaccgctttctttataattaaagtgtaatgttaaaaactatacttatacagaaaagaggatatctttatgtactattccaatggtaattatgaggcttttgcggatgccaaaaagcccgcaggcgtagataaaaaatctgcttatattattggtagtggtttagccggtctttctgcagctgtctttttagttcgtgatgcacaaatgaagggtgaaaatattcatattttagaagagctacccgtagctggtggttcacttgatggtgctaagcgtcctaatgcaggtttcgtggttcggggcggccgcgaaatggagaaccactttgaatgtttgtgggatatgtacagatcgattccaagtttggaaatccctggcgcatcatacttagatgaatattattggcttgataaagaagatcctaactcatccaattgccgtctaatttataatcgcggtgatcgcttaccaagtgatggtcaatatggtctaggtaagtgcactaatgaaatcgtgaagttaatcatgacaccggaaaaggaactccaaggtgaaacaattgaagaattcttcagtgatgacttctttaagactaatttctggacatactgggcaacaatgtttgcctttgaaaaatggcactcagcagccgaaatgcggcgttatgcaatgcgctttattcaccatattgatggtttgcctgactttaccgcattgaagtttaacaagtataaccaatatgagtccatggttaagccacttttggcatatttaaaagatcacggtgttcaatttgaatatgattgtcacgttgataacgtggttgttgatcatgagggcaagcaaaaggttgccaagaagatcgtgatgaccaagaatggtgagcaaagtgatattgatttaaccccagatgatattgtctttgtgactaacggttcaatcactgaaagttctacttatggtgatcaaaataccccagcaccaattactcacgacaagggctcttcatggaaattatgggaaaatttggctaaacaagatcctgactttggtcatccagatgtcttctgtgaaaacttgccagagcgtagttggttcgtatcagctacagctaccttggaaaataagaaaatagctccatactttgaacgcttgactaagcgcagcctttacgatggtaaagttaatactggtggaattatcactgttgttgactctaattgggaacttagctttactattcaccgtcaacctcactttaagagccagaatccagatcaaatcgttgtttggatttatgctttgtattctgatactgagggtaattacatcaagaagagagtcgttgactgtactggtaaagaaattgccgaggaaatgctctatcacttaggcgtgccagagagtcaaatcagcgaattggctagtgaagaaaatatgaataccgtaccagtttacatgccatatatcactagttactttatgcctcgtcatgatggggaccgtccagatgttgttccagaaggatcagttaatattgcctttattggcaattttgccgaatcaccaactagagacactgtctttaccaccgaatattctgtcagaactgccatggaagctgtttatacattgcttaacgttgaccgtggtgtacctgaagtatttgactcaatttatgatattcgtcaattgcttcgtgcgatgtactacatgtctgacaagaagaaattagttgatcaagagatgccattacctgagaagttagctctcaaaacagggatgaagaaaatcaagagaacttgggtcgaagaactgttagaagaagctaacttagtttaaatatgctaggcataataaaaaagcttgagtaaattcaagctttttttgtacgctttttgattgctctcagactaagcaaaatagctactgcaattaaagcaatgacaacgaatgagattacaactttaatcaatcgtgttccgtctaagtgcaagattgaatcgccaccataagcatataagtaagcgaaggggatgacaccgataatgattggtattagctgttttttacgttgctccttattaatcataatgttgacatagctaactgtcgcactcggaataaatggaatcatatatccaataattaatccaagcattggtgattttaatccagtcaataacttataaactttactgttagacatctttttcatgtcatagagtttttgcaaaagttccattaaaattatttggcctaaaatgtcactgatccaattaacaataaatccccaggcagggccataaaggattccgttgagaacacaaaagattccgttggataagccaggaattgctacacagatcgcattaagtaaaaataaaaaggctaagtcttcaataccatggctacggaccatgttaacgagtacttcttcattatggtgatcaaaatgaagtaataaattcaattcaggacggtaatttaaatagagtttatacagaagtagtaaccctaatatcccgccaagaatgaaaagtaatattcgaattatttttcttttcactttgtcaccttcttatattttgtttcatttatttctattttactttaagttgtaggaataaaaaagccatgacgttctattgcgccatgactttggtactaatgctaattactatttggtgaaaagaacgcgagtgccttctggtacggaaatttctttttgaataggagttaggctaccagtaccagcgtttcttgtgtaaagagtagcattatctgtattttgattagcgacaacgacgtagcgctgatctttatcccaattaaaatcacgagggaagtcaccaaaagtggatacacgttgaaccaggctcaaagtatgatcgtcgttaactttgaagacagcaattgaattatgtcccctgttggaagtgtaaacatatttgccatcttgactaatatataaggcagcagctccgttatggtcagtaaaatcagcgggaattgtcttataagtagcaatattttcaaagtcccaagtgtcttcgttaaatttaacgacattgatttgactagaaagttcaccgacaacgtagaagtaattgccatctttactgaagacgatatgacgtgtaccaaagccagtttcgcacttatattgagcaatgtgttttaattgatcattttctaatctataaaaatcaacggtatcattgcctagatcacaactaaccaagttaccagctggggtttcatcaaagaagtgagggtgaggaccgtcaacttgttcaggacgcggacccaacgtttcagctttgtgagttacagtatcaactagatcgagcttgccactgtcgttgtagcggaaaacggacaagacagcagtatgatagttagcagtgtaaatcaactttttggtgcggttaattcctacataagctggcgaagagcctggagttaaatagtggtcaacttcgtttgcgccttgatcacttaattgaaagacgctgattccacctttatcgccagcgttattaacagtaaaaattaaattaccatcttttcggaaataagttggaccaccaacgctaataatattctcagctttgcctaaacgggcatcatttgctgcactggtaataggtaattcataaatccctttggaagtttttttggtgtaacctccgattaaaaccttcatatgtgtgggcctccatctctaaataaaaataagtctaaaataaagtatagcatgaaagcggattagacgcttaaaaacacgatttcctgttgagcaaaaaataatcgccgattttgggctgcttaagtttttaagcagcttttcttatgctaaaattatttttaaggagagattatattatgaaatggattgcaaatattaaaaaaattggtaaaaaggccgtcgataataaagatggcatggtaattttatttggcgagggtgctaataaggatttggaagacgtttctgtcattcaaaaattcagtactgagacgccagttagtggttttgtttttaaaaaaggcgatacaatcactgttgatggtcaaacctatgttgcaaactatgttggtccgatggtagagagcaacatgaaggcattgggacacgcaaccttgttctttaaccgtcccgtttctaagacgccacttgctaatgcgatctactttgatccggatattgatcaaccattacctaattttaaggttgatgatgatattgtttatgaacacatttaaaaattaggatgaatagatggaaaataaccaacataggggtggaactgtttttaaaaaatggttcttagataatcgttttagtattgttttattaaacgtcctgctattctttttaattatttgggtctttaataaagtatcttttgtattgaatcctgcctggatcttctttagtgcaattttaccgccattattattagcggtaattcagtactatatcatgaatccggttgttgattggtgtgaaagaaaatttaagattccgcgagtggtgacaattatagttttattcttactagtagttgtcgcattaatttggattattaatatcttggttccaattgcacagaatcagattaattcattgataaagaactggcctcatatttggaatgatgcggttaatgcaacacaaaatgcgttgcaagatccgcgtttacattcatttaaaggcagtatcaaaggcatgattgataatacgcagaagaccttatttaagtctggacaaagtaccatcaatgcaactatcggcaatatttcatctgccgtcagcattattacaatggtggctatgactttgttaactgcaccgtttattttattcttcatgttaaaagatggtcatcaactgcggccatatattaccaagtttgcacctgaaaaatggcaacctagttttagcaaattattatatgatattaactatgctgttgcttcatatgtccgtggtcaaattactgttgccttttgggtaggtgtgatgttctcattgggttacattctaattggtttaccatatggcgtggctttggcaattttagctgggtttatgaacttaatcccatactttggtacaccattagcaatgattcctgtaattgtaatttcaattatgacttcaggttcaatgttaattaaggtcttaattgtttttgctattgaacaaacaattgaatcaagaattcttagcccatgggtaatggggaataaaatggaaatgcacccaattacaacaattttactcttgattggtgctagtgccgtctggggcttatggggtgtagttttcggtattccaatttatgcgatcttgaagattattgtgtctcgcgtgtacaattattatcgaagagagtctaaactctttgaagagaatgctgtttcttcgaccacgggggatgcagatcatgacgaaagcgaataaatactagatagttttaaagcgtggcttaaaagctacgctttttttgataaggagttttttgaatgactaatcatgtagttttgtatgaaccattgatgccagctaatactggcaatattgctcgtacttgtgcggggactaacactgtccttgatttgattgaaccacttggttttcaaatcgataataaaaaaatgaagcgagcaggtcttgattattgggataaggtcgatgtacgcagacatgatgacttgaatgcctttttgaagactttagggcctaatgatgagatgtatttaatttctaaattctcatcaaaaaattatgcacaagtcgattatactgatcctaacaagaattattactttgtttttggtaaagaaacaactggtttgccagaaacttttatgcgtgaatactatgaccgtaatttacgtatcccaatgtctgataacattcggtgttataacttgtctaattctgtagcaatggttttgctagaagctttacgccagcaaggttttcctaatatggaaacaacccatcattatgaaaatgacaagttaaaagatgactatgatcgtcctgaaagatatgaacgtaatctaggggagaataaataatggattttgaaaaacagacagatattatcgtacaggcatttcattatgatttagttgatgaagataccaaaccaattagtgacgttagaccaggaattagaaaattagatgttagcggtgacgatgagcattcagaagaaaatggtagttactatgatgttgctattcaatatgatgtaattcctgcaccagctatgtttgaagcaagcggcttgattcatcaaatcgtgcaattaaaagattaccatggtgatggctctgacattagtaattcagattggcagttactaactcgaccattagttgagcaacttgagaccttgatctatgaaacaacccaattaactttgggtcagccggttaacttgaacttcaaggctgaattcgataattaatcaggtgagtacatgcctgcaaaaaagaaacaaagaaaggccaaaaagagctacaataagcgaaaagcaaacaaaaagcaaaatcttaattggagtatttgtggtttagtcttgattttaatagcggggctggcttttgtccgtttcggtattttgggtaagcaaatcgcaaatttgattcgaatgttcttcggggattcttatttgtttgcggcaggtttactgggactttttggcctagtaaatttaatctataatcaaccgattcacttaacaattaagcgtagcttggggttagcaatcgcttttttgggaattctgttaattcaatgtaacttgtattttgaacatgaattagttaacagtaatttcctgaattctttttggcatgcaatggccgcggagtttggtcgtgctggagtcactgagagcattggtggtggattaattggttcattagcttatcaacttttttatccactactagggcaaatcggtgtccgtgtttttgctattttattgctgccaattggaattttgatgttttttgatgttaaatttagaacaattatcgaaaaattccagacagttagtcaattattcatcaaaaagaataaagaagctggggtaaaggtcaaagataaatataatgacgttttggaaaagcggcgtcagaaaaaagaggaacaagacgaagatttagttgatgacgataaaccgatttttcctaatgtagcagactttgaccctgccgatccaactgatgacgatgtaacgccgacggctgaagacgtagaagttgagccagagaccacacctgatccagaaccgcaaattcaaattgcaccacaacatgatgacggggtaaaggaactacctaagtcacattcttttgcggaagatgatcaaaagttaaagcaggaattagccgatgtcgatcatggtgaactaaaaactgatgcgccagtcaataaagcttataagatgccacctttaagcttacttgatccaattaaatcgactgatcagagtactgaccgtgatttaattaagaaaaatacccaagttttgcaatcaacgtttaagagttttggcgttaaggtgattattaaaaaagctattttaggaccaactattacgcgttatgaagtccagccagctgttggcgttaaggtaagtcgaattgtaaacttagcggatgatttggctttggcgcttgcggctaaagatattcgaattgaagcaccaattcctggtaagccctttatcggaattgaggtacctaaccgagcaacgtctgttgtttcattcaaagacgtgatggaacatcaagataataaagccaaaagcgatccgatggatgtaccattgggtaaagatgtaactggaagcattatttctgccaacttagctaagatgccacacctattgattgctggttcaactggttctggtaagtccgtagcgattaatacaattttagccagtattttaatgaaggcgcggcctgaagaagttaaattagttttaattgaccccaagatggtcgaactttcagtttataatggtgtgccgcatttattgatccctgtggtgaccgatgctaagctagccgcaaatgcactgcgcaaagttgttaaagaaatggagcgcagatataagctatttgcggctggtggcgtgcgaaacatgagtgaatataatcaaaaagttgctgaaaacaatcgtgataaaactaaaccagtgatgaagccgttaccttatattctagttgtagttgacgaacttagtgatttgatgatggttggtggtcacgatgttgaaggcgcgattgttcgtttaggacaaatggcacgtgctgccggaattcatatgattttggcaactcagcgtccaagtgttgatgttattactggtttgattaaagcaaatgtaccatcgagaatttcctttgctgtatcaagtggagtggattcaaggactattttggatcaaacaggtgcagaaaaattacttggtcgtggtgatatgctttatatgccaattggggcatctaaacctgaacgtgttcaaggtgcttatattgctagtgatgaagttgaacgcgtaattgaatgggttaagaagcaacaagaggttagttatgatgagacaatgattcctaaaaaaggtgaaaattcatcaaatgctgatagtaaagatgatgagccagcagatgaattctatgagcaagctgttgatttagtacgacgtcaacagacggccagcgtgtcaatgttgcagcgtaggtttagaattggttataatcgtgctgctagaattgttgatgaaatggaagctaaagggattgttggtccatctgaaggctctaagccacgacaagttttagtgccaccaataaagaatgaaggtaattcaaacaatgctcacaactaatattgcaattagaaaaaataaaaagtttacaacagccgctattggctgttttttgcgtttgccgctgactaaacataatttagcttatgctagtttgctagcgcgaatacagatgaatagcagcttaagttatccgtcacttgctttacaacaaaaaagattggcagaattatatgatttacagctggagattatgccacaagtttttggtaaagaaatacttttgacttattatgccaattttgttgaaccgattgagattttggatccacattatacgtatgaagaaattcttaatgtgattgcacaaatagttaatcaacctaattttgcggaacctttggtggaatatgctaaacgtcaattagcagaagaatatcaagaactgattgaacaaccatctaattatgcgttggagcagttttttaaattgtggtatcaggatcaacctgattatgcggagacatttattggctcactagatgaaatcaaagctgcgactagcacgactatgatgcattattggcgtaatttagctaatgtaccaatgcaaattttaggaatgaccagggataataatctggtttctaaattagctcaggctatgtttcaacaaactggtttaactaaatcatttcaaacagctagtctaactattccagctaaaagaaagttgattgaaaaagaggatgatcaaggaaatgtgcaagctcaattgttaatgggctttggtttagaacaaagtattgattatcgcggtcaagtaatgggaatattattatcgcaatatttggcaggtgatcaatcatctaaattatttacgcaaattcgggagcaattgggagcagcttataatgttgaagcaagctgctttgccaataattctttgtttttagtcagtgcaggacttgatcctagtaagattgcagcggctcgaaaaattattttatccgaaatgggtaaactagttcagggcgaagtagaagatgatttatttaaaaaggctaaaaaggcaattttgcgtaatatgaagattggtctagacggtcaaaactggcagatgggtcaaatgttgcgtgatgaattgttctcgggatatttagactttgatcgtgaaaatgcaattaggagagctacacctaagcagttagtagctttcgcacaaaatttattctttaatgaaagttatgttttaaaatgatgacaccaaaaattatcaaaaaagaatatcagtcaggctttaaagccgaaattattttaaagccacatttttatcaacgatttttcggtataattgttgactttggtagtagtgatccacaaaaggttgccggttcggctcatttcttagagcataagctatttgccaaaaaagatggtgatttgtcaacgcaatttgaagatattggtgctgacgttaatgcattcacgtcttttaatgaaacaatgttttattgtagtggaattgagcatacgcctaaaatgatcgatctcttgtttgaattggtagggcagccgtattttactaaggaaaatatcgcgcaagaggctccgattattgaacaagaattggccatgtatcaggatgacccaacttggagcgtaaataatgcgattatgcatgatatgtttggtgattctaatctagggatcgaagttgtaggtacgaaagaatcaattaatcaagttacagtgaaaaacttgacccaagtttatgaggctaagtatgtgccagaaaagatgcaatttgttgcttgcggtgatttttctgataatcaagtgcaaacgattttgcggcaagtaggaaagctgcagcaaaaatatttgcacgggaaaggtaaaagcacagctgaaaaacaagttagttttcgcatgttacatgatcaagtcttgccagccagaggtaattctaattcctttggtttaggaattcgctttaaaaactttaagaaagtattattaagctttgatttgactcaaattctgttagaaataatgttagaatcaaaactaagtgcaatgggaccatggtttgaagaaatgagaaaaaagcagttgttaatggattcgctgcagatttctgttaattacaccaggcagggcgattttgctactatttttggtgtaagtcctcaagctcaagaagtaattgcagaaataaagagggtattgacggaaccaattaagaaaaattcagcggaataccgttttattagacaaaacttcattttgcaaaagaaagaatggttagcacgcactgctaggacaagtaatgatctgtcttatttggcaattgaattaattgaagaaaatttagatcatgaaaatttaacacaaaatatagctaaattgcaggcgatgaattttgatcagttttatgactactgccaaaagattatgaaagacagtgaactttgttctgcttacttagaaaacaagtaaggggttgataaagttgaagcgagcaattgtctttggtgcaactggcggtattggtcaagatatttgtcgagatttggcagatgccggttggtcattatacttgcattatcattctaattctcaaaaagctgaaaatttagttcaagagctgtttgctaagcatcctgaccaggattttatgtcgctacagttggattttgcgacaggggatgcacagttaacagattttgttaaaaacttgttgccagttaatgcagtagtttttgctcaaggaattactaagtatggttttttaggtgatgaaaaattagcaaatatcactgatctgattaatattaatcttactgtgccaattaagttaactaaattgttagagccacaactgatgaaacgagattttagtcgtatagtttatttaggctcagtctatggtggtgcaggtagtgcattagaaagcgtctatagtgcaactaaaggtggtataaccaggttcgctcaggcttatgcgcgtgaagttgcttccaataacttaacggttaatgtaattgcgcctggtgcggttaaaaccaaaatgaatgcattcttttctgaggatacgattcaagaggtaaaagatgaaatcccagttggtcgttgggccaatggcagtgatatttcatactgggttagaacactgctagatcgacgtagtagttatttaacaggacagacaatttatgttacaggtggatggcttttataactaagacgttgtaatgagaattttatggtatactcaacatgataaattaaaatttgaagaggtaaatatggcagatatcggagataaattaaagagcgccagagaggctaagggactttcaattgcagatattgaaaaagctactaaaattcagagcagatatcttgaagcgattgagaagaatgaatttgataaacttccaggcgatttttatgttagagcatttattcgtcaatatgcacaagttgttggcttggatggtaaggagttattaagtgattaccacgatgatgtaccagaagctaagccagatgagtacgtagaaaactcgattgataataagagtgaagaagtacgagaaaccaccgacaataagaaaaatttgtggaagaattacttgccacgaattgcgatcggacttggtgtaattatcgtaattcttgtagtgtacgttttgtatgctcgtctttcttcaggtggtcaaaagaaccaagctgataataatgatgtaactgtttcatcacaaaagtcatcatcgtcatcttctaagaaagctaaaaaagtagtagtcaataaagttaaggttactaaggttagtgacaatgagtaccgagttactggcttgaataaaaaccgtcgcctagttgtgcgtgctggtgaaaaccaaaatatttcagcgggtgtacaagtcaatggtaatgctaatagctggcaatcaactttacttgctaatcaaaagcacactatgactttgccaagcaatgcagagagagtagtgattactttaggcaacgataatggtacttcaatcactattgcaggtaagaaaatcccatatacagcaaacaatgcgtacaggacaattactttgttgattggtaaggctaagggaactactagtcaaaataatagtagttctaataatacgggctctactaataacaatacaaccaatagtagttctacccaaagccgtacaactactcaaagcagtgctactcgtcaaagcagtcgtcaacaatcatctactactactcaaagtagccaacaaacccaacaaagtagtcaaactcaacaatcatctactactcaatcatcagcagacactaacaatggcaatgatggtggaaataataacaacaattaaaatctaggagtgttagaatgaatttacctaataaacttactgtttttagaatctttttgattccagtatttatgttaatcatcatttttggtgggaatgctagtgttcaagcagcaggctcaactgttgtttggagtcgtgttattgctgctatcgtttttgctgttgcttcggctactgattggtttgacggtcacattgcgcgttcacgtaatatggtaaccaattttggtaagtttgctgatccattagctgataagatgttaactatgactgctttcattttcttagttgaattgaaacttgctccagcatgggtagtagctatcatcgtttgtcgtgaattggctgttactggtttgcgtttgatcttagcagaaaatgaaggacaagttttagcagcaaagatgcctggtaaaattaagactacttgccaaatgttatcaatcattttcttattgattggtgacttcttccacattggtactatcttactttaccttgcgttgatctttactatttactcaggttacgattacttccaccaatcatggggcgtattcaagggctcaatgtaaaatagtattaagtcaagaatgattaaaaagaagcatttgcttctttttttattttgtaaaaaaataatggcgatttttagcgtaataaataatagagggtaaaaaatcctttgaacgttcgtttgcatttctcttgcaaattggacggcggtcaaagtataattattaggtacgaaaaataggaggacattaatggccaaagacgaaaaacaggctgctttagatgcagcgcttaaaaaaatcgaaaagaatttcggtaagggtgctgtaatgcggatgggcgaaaaagctgatacgcaaatttcaacagtgccaacaggttcattagctttagatgctgctatcggtgtaggtggatatcctcgtggtcgtattattgaagtttatggcccagaatcatctggtaagactacggtagcccttcatgctgtagctgaggtgcaaaagcgtggtggtactgcagcatatattgatgccgaaaatgcaatggatcctgcttacgctgaagctttaggtgtagatattgattcactaattttgtcacaacctaatactggtgaagaaggtttgcaaatcgctgatactttgatttccagtggggcaattgacattgtagtagtcgactctgttgctgccttagtaccacgagcagaaattgaaggcgagatgggagatgcccatgttggtttacaagcgagattaatgagtcaagctttgcgtaagttatcaggtaatatttctaaaaccaaaactattgccatctttattaaccagattcgtgaaaaagttggggtaatgtttggtaatcctgaaactaccccaggtggtcgtgctcttaagttttactcaactattagattggaagtaagaagagctgaacagattaagcaatcaggagatgttcttggtaacagagttaaaattaaagttgttaagaacaaggttgctccaccatttaaggtggcagaagtagacattatgtacggtaagggaatttcacaaagtggtgaattactggacatggctgctgataaggacattatcgataaagcaggttcttggtactcttacaagagtgatcgaattggtcagggacgtgagaatgctaagaagtatctagaagagcatccagatatttatcaagatatccaaaagcaagtgcgtcaagcttacgggattgatgaaaagtcaattgctgatcgtgaagatccagaaaagatcaaggagaagcgcgaagaagccaagacagaaaaagaagctgctacagataaaaagtctgaacaagctaaataattatgtcaaaaaccctggatttattttccaaggttttttgatttaattgacatgaacagataggttctttatcataaaagttgtgtgaataattctaaaaaaggcgatagtaatcatgaataatatgttaacaattatgattcccgtcgcaactgccattgtttcattcttggtgggttcagtggttggttatgcaattcgcaagcattcttgggaacaaaaagctcaaaatgcccagaatgatgctgaccacattttagctgatgctaaggcacaggttgctgcagcacaagctgaagttaatgcacaaaagcaagcagcagcggctgttaagcaaagtgcagaaaatactaaaaaagaaaaaattcttgaagctcaagaacaaattcgtgattttaggcaaaagaccgaggatgagttaaattccaagaaagataatttagctcgggagaaaaatcgtttacaacaacgtgaagataccttagatcataagaattctttattagatgaacgtgaaagtggactcacgcaaaaggaagaccaattaaagcagcagtatgctagcttaaaggcaaaattaactgaggctgaagaattagtagaaactagacggcaaaagctttatgacgtagctaagttggatgaggaagaagccaagaagattgtgcttagtcaattatctgatgaactagtcaaagaacgagccgagatgatcagaaatagtaacgaagaagtaaaagctaaagctgatcattatgctaatcaggtcattgtggatgctattcaaagtagcgcggcagatacagttgccgaaacaactgtatctgttgttgatctaccaaatgaagagatgaagggacggattattggtcgtgaaggacgcaatatccgttcatttgaagctttgactggaatagatctaattattgatgatacgccaaaggttgttaccttgagtggttttgatccaattagacgtgaaattgccaaaagagcgatggaacgcttaatcaaggatggccgcattcacccagctagaattgaagaaatggtcgataaggccagaaaagaagttaacgatgacatctatgaagcaggtgaaagtgctttgatggagctgggaattcaccggatgaatcctgaattagttaagacgctaggtcgtcttaaatatcgtacttcttatggacaaaatgttttgtcacattcaattgaagttggtaagctagcaggcacgatggctgcagaattaggcttggatgaaaaattagcagttcgcgcggggttattacacgatattggtaaagccatcgatcatgatattgaaggttcccatgtagaaattggggttgaactaactcgtaaatatcatgaaccagatgttgtagtaaatgcgattgctgcacaccacggcgatgtgcctaagttgtcgtttattgctgaacttgttgttgcagcagatacgatttctagtgctcgtcctggtgcaagaagcgagagtttggaaaattatattagacgtttgaccgaattggaaaagattgctaagagctaccaaggcgttaagcaggcttatgcaattcaagcgggacgtgaagttcgtgtgatggttgaacctgacgaaatttcagatgatcggacagttattttggcacgtgatattcgtaatcaggttgaaaaagaacttgattatccaggtaatattaagattaccgttatccgtgaaaaaagagttgtggcgatcgctaaataaattaaaaagtttggaagataatttttccaaacttttttgctatttgtgcaaaatactgactacttgtataattagaacaagtaaataaggaaagtagccaaatatgtttaaaattattgttgaattattcttattagtaattatttcagcggcaattacaccgtttattcgacggcttgcctttgtcttaggagctgttgataatcctaatgcccggcgagttaataagaaaccaatgccaacgattggtggactggggatttttgttacttttaatatcggtacttttgttctgttgcgtgagcaatttccgactcatgaaattttttcgattttactcgcttcaagcgtaattgttttgacgggattgatcgacgatattttggagttaaaacctagacaaaaaatgtttgggatttttatcgcttcattgattatctactttttagctggaatcagaatgaatgtgttaaaggtgccattcatcgcacatgaagtaaatctaggttggtggagtttcccaattactattttttggatcttagctttaactaatgcagttaacttgattgatggacttgatgggctagctgatggggtttcaatgatctctctgactaccatggggatcgtaggttatttcttcttgcacactcatcagctatatgtcccaattgcttgttttatgttagctgcctgtttattgggctttttaccatataatttccatccagcaaaaattttcttgggtgatacgggtgcactttatattggttttatgatcgccgttttatctctgaaggggttaaagaatgtaacttttatttcattgttggtcccaattatcattttgggagtgcctattactgacaccgtttatgcaatgattcggagaaagctaaacaaaaagccaatttcagaagcagacaagcatcatttacatcaccagctgatgcgaatggggttaacgcaccgacagacggtattgactatttacgcattatcattggttttctcatttatttctttattattcctgctttcgccaacttggggcacttggcttctgatcttaggcttgctgattgccttagagtattttgtggaatcaattggtttattgggtgaaaaataccatcctttgatgcatgtaattcagaaaattattaatcaaaagagtaaaactgatccaacaattgaagtttggcacttaggagacgaaaaaccagatcaattgaagagtaaaaaaaataataagtagcaaaaaagcatttggaaatatccaaatgctctttttattgttcatgataattattagcttcaacaggaatttcattatagcgtttttcaccattagtaaaggtaacctgtccggccaataaattagttaggtcttccttaggtttagcttgttggtcatcgttaacaaaaatatgaattttaacatccacaccgtattcggtattggcaataaaaattttttgctgttttaggtaatgatcaacttcatcgaagcggttatagggtacgctaaaaattaattcttgttgtaaaacgcgtttaatgacgccgactttttcaacaacattggtgacactattggaataggcacgaattaaaccgcctgctcctaatttgattccaccaaaataacgggttactacgactgtaacgttttttaaattcattaattgcaatgcttttaattcaggaacaccagccgtacctgatggctcaccattatcgctttctttgacctggtcgtcatttaagccgatcgtgtaggcaaaggtattgtgcgaagcatcgcgatattttttagagattttttgaataaaatcatttgccgcatcagtagtagtggtgcgggcaatattggcaatgaatctgctctttttgataattaattcaccggtgccgttttctttaatagttaaaaaattttccttttctgacaaaataatcgcctctttttgcgtaatagataatagggaggtaaaaatatggaagatttgactctattatcaggtcgtcaatggattgttagtcaagaggattctagcacatttgagggatgccgcaaaattccagtaattgaaaaaggtaaatgcaatcgctgtggcagccaagttaatagtcgactgcctaatggtaaatattattgtcgtggttgtattggcttgggacgtgcaaatgagggcgattggcttattagaaaagacagtaataatactttttctcatgttaaaaacgggggattaagctggcaaggtaaactaaccccattgcagcagaatatttcggataaattagtacaaaattttgaacaaagaaaaaatacattggttcatgctgtaactggggcgggtaaaactgagatgttgtttcagttgattgctcgatgtatgaaaaaaggacagcgcgcttgtattgctacaccaagaattgatgtggtaaatgagctgtttccaagattttcggcagcgtttgcccaagttgagatcggtaagtatcatggccgtgaatttaaggaaatagggctagagcagttgacaatttgtactacacaccaattaatgaagttttatcgtgcctttgatttattggtaattgatgaggtagactcttttccttatgtaggtaatccgcaactacattttgcggccaaaaatgcggttaaaacaactgggactcgaatgtatttaaccgcaacgccaacgaacgatttgcttttggaagctaaaacagggaagttagaaattttgcgcttaaatcggcgttttcatggtggattattgcctgtaccaagagaaaggctttttatcaggccgtttttgcggaagggacaaattcatcctaaattaatgcaggagattaaaaaagtcattcaaagtggtcatcctttgcttttgtttgtaccacggattgaagaaattccgctttatcaagaagctttgcggaaaaagttgcaaaataaaattaaattggccggtgttcatgcacaagatccgcaacgattagaaaaagtacaggcttttcgtgatcgtaaatatgacttattgttgacaaccacaattttagagcgtggtgtaacttttaaaaatgtttgggtaattattattgcagcagatgatgcaatttataccgctgctagtttggtgcaaattgcaggtcgagttggtcgggctcacgatgaccaaacgggcttagttttgtattgttatcatcgttataccaagaatattcgacagagtattaagcagatcaaggggatgaatagatgagaacttgtttattatgtgagcaggagtttactccaccggtacaatttgcacaacttttttcttttaaaacagcgcgaaaaagtaaaatttgcttgcaatgtttaaaacaatttgaaaagttagcagacaatcgctgctctggctgtgataaggaactaggtcaaggctttatgtgtagcgattgtcgaaattggcaagccatttatggcgaaaatattctgcataatcatgctttatatcgttataattctgcttttcatgacttgatggttgcgtataagcggcgtggagattatgttttgcgggaagtattgcaagatttgtgttatgactatttgtgtaaaactaactatgacttttatgtgcccgtgcccacttcacctgaacatcaatcaagacgacagtttgatacaatttttgctatttatgctgatattttgccgctgacaccgcttctgattaaacaatcgggtagtcatgcccaaggtgagaaaaacaaagaggagcggcttaaaacgcctcaaagctttttgattgataaaaatattaaaatcaaggaaaatatagtttcaggaaaagtattaattttggatgatatttacacgaccgggcgcacgctatatcacgcgcgggaccgtttacagcagggttttcccgaaatgaaaattgaaagcttttcaatttgtcattagatttgttatgaaacgcttacattttttggtataataaatttgtaaagaaaaaccgcatagcggtgaaaggagaatcttatatgttaaagtacaatgttcgtggagaaaatattgaagtaactgatgctttgagaagttatgtagaaaagcggttaaacaagttagagaagtacttcgaattgaatcaagatgtgattgcacacgtaaacttgagagtataccgtgatcactcagccaaagttgaagttactattcctttaccatacttagttttgagagccgaagaaaccacggatgatatgtatcgtagcattgacttcgtttctgaaaaactcgaacgtcaaattagaaagtacaagactcgtgtaaatagaaagagtcgtgaaaagggattacaagatttctttgtagaacaacctgaagaagaagaaaagaagcctagcgaatttgatattgttcgtaacaagcgtgtaagcttaaagccaatggatccagaagaagctattttacaaatggacatgttggaacatgacttcttcgtttttgaagatgcagaaactaacggcactagcgttgtttaccgtagaaacgatggtcgttacggcttaattgaaactaacgaataattgagttaaaatactcgttaattcaaaacctcgcgtttgtttgagcgtggggttttttgtttagaatatttttattttgctgataaacatgttaaaattattctgtatttttagactttacgacatataaggaccgatttaatggtaaatattttaaagaaactatataacgacgataaaagagaacttaagaaatttgaaaaaatcgcagctaaggtagaagctcatgcagatgaaatgagcaagctatctgatgaacaattgcaagcaaagacaccagaatttcgtgaccgtttaaagaagggcgaaagtttggatgatcttttaccagaagcattcgcagttgctcgtgaaggtgctaagcgtgtattaggactttacccattccacgtacaaattttgggtggtattgcacttcactacggtaacatcgccgaaatgatgactggtgaaggtaagactttgacagcaaccatgccagtatacttgaacgcacttgaaggcaagggtgtacacgttgttactgttaacgaatacctttcaagtcgtgacgaagaagaaatgggtcaactttacaagtggcttggcttaactgttggtttgaacttgaactcaatgtcaccagacgaaaagcgtgcagcttacaactgtgatgttacttactcaactaactcagaacttggctttgactatttgcgtgacaacatggttgtttacaaggaacaaatggtacaacgtccattgaactacgctatcatcgacgaagttgactctatcttaatcgatgaagctagaactcctttgattatttctggtgaagctgaacaagcaaacagtgattacatccgtgctgaccgctttgttaagactttgactgaagacaagagcgatgatgatgccgacgatgatgaagatcacggcgattacaagattgactggccaactaagactatttcacttaccagaactggtattgaaaaggcttgtcaacactttggcctaaagaacttgtacgatgttgaaaaccaaaagttggttcaccacattgaccaagctcttcgtgccaactacatcatgcttaaggatatcgactacgttgttcaagatggcgaagttttgatcgttgactcattcactggtcgtgtaatggaaggccgtcgttactcagatggcttgcaccaagctattgaagctaaggaaggcgttaagattcaagaagaatcaagaacgcaagctactattacctaccagaacttcttcagaatgtacaagaagttgtcaggtatgactggtactgctaagactgaagaggaagaattccgtgaaatttacaacatgcaggtaatcacgattcctactaaccgtccaattgccagaaaagacatgccagacattttgtatccaactttggactctaagttccacgctgtagttgaagaaattaagaagcgtcacgctaatggtcaacctgttttggttggtactgttgccattgaaagttcagaacgtttgagtaagatgcttgataaagcaggtattcctcacgcagttttgaacgctaagaaccacgctaaggaagctcaaatcatcatgaacgctggtcaacgtggtgccgtaactatcgctactaacatggccggtcgtggtactgatattaagcttgggcctggtgttaaagaacttggtggactggcagttattggtactgaacgtcacgaatcacgtcgtattgataaccagcttcgtggtcgttctggtcgtcagggtgacccaggttacaccagattctacttgtcgcttgaagatgatttgatgaagcgttttggtggtgatcgagttaaggacttcttggatcgtttatcagataatgatgatgataaggttatcgaaagtcgcttgattactcgccaagttgaatctgctcaaaaacgtgttgaaggtaataactatgatactcgtaagcaaactttgcaatacgatgatgttatgcgtattcaacgtgaaattatctacggcgaaagaatgcaggtcattgaagctgataagtcattgaagaatgttttaattccaatgattcacagaacaattgatcaccaagtagcaatgtttactcaaggtgaacgcaaggaatggcgtcttgactcattacgcgatttcatttcctcaagtttgacttcagacaaggtaactgactcaattgacttcaagactattagtgttgaagatttgaagaagaagctttatgacattgttgagcaaaacttcgaagataaggaaaaggccttaggcgatcctagccaaatgcttgaatttgaaaaggtagttatcttgcgtgtggttgatgatcgttggactgatcatattgatgcaatggatcagttgcgtcaatcaattggtcttcgtggatacggtcaattgaacccattagttgaatatcaagattctggttacagaatgtttgaagaaatgatttcaaatattgaatttgatgtaactcgtttgttcatgaaggctgaaattagacaaaatcttagtcgttaataaagaaaaaggggagttaagagcttccctttttttgcaataaaataaaagatggtaggtaaaaatggaaattagtgaaattcaaagtgtgttagatgaactaaaaaaacgtctaaatcactttagggggtctctttgacttagatgcgattgatgaaagcatcgaaattaatgaaaacaagatggcgcagcctgatttttggaataaccaggaaaaagcgcaaaaattaattagtgaaaccaaccgattaaaggaaaaacgtgattcatttttaaaattgcaaactagctacgaagacgaaactactgcggttgaacttttgcgtgaagaaccagatcctgacttgcaaaaagaagttgaagcggatctagctacgctgcaagaagattttcataattatgagttagacctgctcttgtcgggtaagtatgatagccataatgctttgatggaaattcaccctggtgctggcggtacagaagcgatggactggggacagatgcttctaagaatgtatcaacgttattgtgatacagctggttttaaatttgaaatcaacgattatgagcctggtgaagaagctgggttgaagagcgttagtgcgcgaattgtaggtaaaaatgcttacggaatgcttaaatcagaaaatggtgtccatcgtttggttagaatttcgccatttgatgcggctaaaagacggcatacatcatttgcttctgtagaagtgattccagaagttgatgacagtattcaaattgatattgatcctaaggatttacgggttgatgtttaccgctctagtggtgctggtgggcagcatattaataaaacttctagtgccgttagaattacgcacttaccaacaggaattgtgactacgtctcaggcacagcgttcacaattgcaaaaccgtgaaactgcgatgaatgaattaagagcaaagctttttcacttagaagaagaaaaaaagcgtaagcaaaagcaggctctgaaaggcgatcaaaaggagattggctggggatcacaaattaggtcatatgttttccatccttacaacctagtgaaagatttgcggacaggtcatgaaacagctgacgctcaaggagtaatggacggaaaattgcaaccgtttatttattcctatttacagtggttgcttagtcaagagaatccagattaggttaaaaaatgagtttaatggaaattgtaacgcttgttttagtagcgctaattattttaagtttattgtttgttctatttaaggcatttattttacttttaccagtagctgtaattgcgattttaatcatttggcttatttatcggtttactggaaggaaaaatcaagataatatgccaagtagtggaagttatcgtgagtggtttaaggctactagtacttctggtcctagaccaagaaaaaaagctagaaatgtcaccactaaagatattgataaatagttaggaggcctaatatggctgatgaagttagattaagcaaattgatccaggacaatcagagtatccttgaagtttaccaaggacaggaatatatcaaagatgaagaaatttatgtttctgatatttatcgccctggattagaattaactggttattttgatttttatcctgcgcaacgaattcaattattgggtcggacagaaatttcatatgcggcacgcttggaccatgatattagaatgcatgtctttaacaaaatgtgtactaaggctacaccgtgttttttgatttctcgctctttgcctgtaccggaagaattaactacggcagcagaggaacacaaaatcccaattttgcgtacaagagagtcaactacctacatatccagtattttaactgaatacttgcgtgctcgtttagccaaaagaaccagcattcatggtgttttggttgaaatcaaagggatgggtgtgctgttaactggtgcatctggtgttggtaagtctgaaactgctttgggattagttcaaagaggacacagattaattgcggatgatcgagtagatgcttttcaaaaagaccataataccgttgtgggtgaagcaccaaagatcttaaagcacttaatggagatcagaggaattggcattattgatgtgatgaatttatttggtgccggtgccgtaaaaaatagaacagaaatccaactggtaattaatttggttaattgggatccaaaagctaattatgatcgcctaggttttcaagaaaatacgcgtgaaatctgcaatgtaccaattccacaggttaatattccagttaaggttggacgcaatattgaaattattattgaagttgcagcgatgaacttcagagctaagaagatgggctatgatgcaactcaaacttttgataataatttgactagtctgatttcagagcactcaaaagaagatacgaataaggtgccgcataatgactaatttagtaattaatccggtggcctttcatttagggaatttaagtgtcaaatggtatggcatcattatggcagtagccattatgttagcttgctggatggcgattaacgaaggaaaaaaacgtcaaattattccagatgattttgtcgatttgctattgtgggcagtaccgttagggtatgttggcgcacgtatttattatgtgatttttgaatggggttattattcacagcatcccgagcaaattattgcgatttggaatggtgggattgcgatttatggtggtttaattgccggcttaattgtgctgttgattttctgttataaacgaatgctacctccatttttaatgctggatatcattgctcctggagtcatggcagctcagatttggggacgctggggtaattttgttaatcaagaggcgcacggcgcaccaactactcttcattttttacaaagcttacacttaccacaatttattattgagcaaatgaaaataggcgggacgtattatcaaccaacttttttgtacgaatcattttttaatttgattggcttaatcttaattctatccttgcgtcataaaaaacatctcttcaagcagggagaagttttcatgacctatcttctttggtatagtgtagtaaggttcttcgttgaaggaatgaggacagatagtctgtatatttttggtataatacgagtatcacaggcattaagtttaatcctctttattgctacaattattttatggatttatcggcggaaagtcgttaatccaaaatggtatttggatggtagtggattaaaatacccgtattcaagagattagaattaataaaagattttaattagaaagtttgagagaaaaaatgacaaagattgcagttttaggtaatggttcatggggttcagtattgggttcaatgttagccgataatggtaacgatgtaactctttacggtaacattgatagtgttaatgaagaaattaacgctcaccacaccaatagccactatatgaaggattggaaattaaatgagaataccaaggctactggtgatttggaagcagctcttgatggggcagaacttgttttatttgttttgccaactaaggcagttagaatcgttgctaaaaacgtacgcaaggttttagataagacgggtgctaagccactgttagttactgcaactaaagggattgaaccaggcagtaagaagcttatttctgaaattttaactgaagaaatttatccagatgatgaagataagattgttgcaatttcaggtcctagtcacgcagaaaatgttgctcaaaaagatttaaccgcgattgcatgtgcatcaactaatgaagaaaatgctaagcgggtacaagaattgttctccaatgactacgttcgtttctacactaacgatgatttagtaggtgtagaagttggtggtgccgttaagaacgtaattgcgattgctgcaggtattttagtaggccaaggatatggtgatgacgccaaagctgccttgatgactagaggtttagcagaaatcactcgtttgggtgtgcaatactttggtgctaagccaatgaccttctcaggcttgtcaggtattggtgacttaattgtaacttgtacttcagtaaactcacgtaattggcgtgctggtaaacaaatcggcgaaggcaagactttagattacgttttgaaaaatatgggacaagttgtcgaaggcgctactactgttaaagctgttcacgaattatgtgaagaaaagggcattgatatgccaatttcagaggcaatctaccgtgttctttatgaagatgctgatgttgatacagaaattaagaaaatgatgggtagagaaccaaagcctgaaattcgtttataaaagataagcaaaatagttggcaagaagttaaatctattgtattatttgcttatcaaaagtaagtagaaagaaggatagattatggctgataaatacgacgtaattattattggtgcaggtcctggtgggatgactgctggcttatatgctgcgcgtgctaacttaaagattcttgttcttgatcgcggtccctatggcggtcaaatgaacaatactgatgctatcgacaattatcctggtttttctgaaatcaaaggtccagaacttagtcaaaagatgtacgacacaatgatgaagtttgaaccagattataagtatggcaacgtacaaagtgttgaactcgatggcgaggataagttagttaaaactgatgatggcaatgagtatcgtgcaccgatcgtaattattgctacaggttcagatcataagcatttgaatgtgcctggagaagaagaatattcaggcaaaggtgtttcatattgtgccgtctgcgatgccgctttctttaaagatgaagatgtagctgtcatcggtggtggtgattcagcaattgaagaaggaatttatctttcacaattagctaagagcgttacagttattcaccgccgtgatcaattgcgagcacaaccaactttgcaaaagcgtgcatttgcaaacaagaagatgcatttcatttggaatgcacaaactgaagaaatcttaggcgatgacatgaaagtcacaggggttaagtaccgcgataaggaaactggtgccgaaaaagaaattccagttgctggtgtctttatttacgtgggtgttttaccacaaactgaaccttttaaggatcttggtatcttggatgaccatggttggattgtaactgatgatcatatggaaactaaggtgcctggtatctttgctttaggtgatgttcgtcaaaaagatttacgccaaattgctaatgcagttggtgaaggtagtgtagctggtcaagctgcatataattactaccaagacttacaagacaagaaaaattaaatttattcgttttttcattaagacatgttcgtattggacatgtctttttttgtctaaagcttaaattaatgactaataagttttataattaatagcagataatagaaaattgttaacagtttgaaagcgctttagaaatccaacttttaatgaatagaggacattgatggacgctaaagaaatttatacagaatggcaaaaagctactaatttaccagattatttaaaagatcaattaaatactttgggcaaggatgaaaaatggatcgaagatgcctttggacaggatattaattttggtactgcggggatgcgtggtcgtcttgaacccggtaccaaccggattaacttgtttactgtaggtcgagtaactgaaggcttagctcgtttaattgaagaaaatggtgctgatgctaaaaagcgtggggtagctatttcctttgattcaagatatcactcaagagagtttgcagaacatgctgccagagttttaggtgcacacggaattcatgtttacttatttgatgatttaagaccgacaccagaactttcatatgcagtacgtcatttgcatactttcgctggaattaatatcactgcttcacacaatgctaagcaatacaatggctataaagtttacggtgaagatggtgcacaaatggcaccagataatgcagatcgactttttgcttatgctcaaaaagtaactgatatttttgctgtcaaggctgcaccagtaaaagaattgcgtgctaatggcaccttgcagttaataggtgaagatgttgatgaagattacttgaatgaattgaagcaagtaactgttgatccagagatggttaaggccaacgctgacaagttaaagatcatttatactccacttcatggtacaggcaagatgctttatgatcgtgctttcagacaaggcggctttgataatgtgattcctgtgccaagtcaatcaatcattgatccagaatttccaaccacaattaagcctaatccagaataccgtgatgtttttgaacctggttttaagttggcaaatgaggtaaatgctaatgtcattattgctactgacccggatgctgatagaatgggtgcagcagttagaaaaactgatggtgatttccaagttttgactggtaaccaaattgctactttgatggcttactacctattggctcatatgaaggaaaatggtcaattaacccctgattatgagatcgttacttcagttgtttctagtgctttgccatttaagattgcagaggactttggtattaagactaagcatgttttgacgggctttaagtacattggtgaagaagttgaccggatgaataaagctggtgatgctaagttcttgatgggctttgaagaaagctatggctatttgtttaaaccatttgctcgtgataaggatgccatgcagggtgcattgatgtttgccgaagttgcttcatactatgcttcacgtgggatgactgtctttgatggtttgcaagaaatttggcaaaagtatggcgttgcttatgaaattacccgtgcaattgaaatgccaggtattggtggtcaaaagaagatggccgaattaatgagcaagttgcgtaatgagcacttaactgaaatcggcggtagtaaagtgcttaagattcaagatttcttgcaaaaagaaactattgaaaatggcaaaaagacaccattagaagggttcccagaatctaatgtgttgaagtacttcttagatgatgaaacctgggtagcacttcgcccatcaggtactgaaccagtaattaaggcctatgttggtgtaaacaaaaaagacattgccactgcagaaaaggcagctgaagattatcaaaaggctttagcagatttacttaaataattaagcatttttcgtgcgaaagcacgttcgcggtagtaaaatatagatactaattaaaaagttggactatgcttgtccaacttttttcttgaggagttttttatgattaaacgacaaaaaaatcgcaaatttgaattagtatcaaagtttaaaccagccggtgatcaagagcaagctattgataaactgactgctggatttaaaaaaggatataaagaacagattctggaaggtgcaactggtactgggaaaactttcaccatggccaatattattgctaagctgaataagcctacattagttattacgcataataagaccttggtagggcagctatatggtgagtttaaaagtttctttcctaataatgcagttgaatattttgtttcatactatgattattatcagccagaagcttacgttccacaatcagacacttatattgaaaaggattcggcaatcaatgatgaaattgatcagttgcggcatgctactacctcagctttaatggagcgtaatgacgtagtagttgttgcttcggtttcttgtatctatggtttgggtgatcctaaagagtatgcgcgcagtgtcttgatgatccatgaaggcgaagaatatgaccgtaataccttgttgcgtgatttggtaaatattcaatatgatcgtaatgatattgactttcaacgcggtcgttttcgggtccgcggggatgtagttgaggtctttccagccggcaattctaatcatgcttatcgaattgaattctttggtgatgaaattgatcgcattgttgaagttgattcgttaaccggtgaggtgatcggtgagcgtgagagtatttcgcttttcccagctacgcactttatgaccaatgacgagcaattgcggcgagctttgggagcaatttctaaagagatgaaattgcaggttaaaaagttcgaaggcgaaggcaaattgcttgaagctgaaagaatcaagcaacgtactacctatgatatggaaatgatgggtgaagttggctataccaacggaatcgaaaactattcaaggcatatggaaggacgaaaagcaggagagccaccgtatactttgttggacttcttcccagatgatttcttaattttaattgacgaatcacatgctactatgcctgaaattagagcaatgtacaatggtgaccgtaatcgtaagcaaaccttgattgactatggtttccgtttgccatctgcacttgataaccgtccattaaagctatccgaatttgaaaagcatgttaatcaaattttgtatgtctcagctaccccaggtgattatgaacttgaacgaacagatcataaggttgaacaaattattcgaccaaccggattgcttgatcccaagattgaagtaaggccaattgagggtcaaattgatgatttagttggcgaaattaataaacggattgaccgtcatgaacgagtctttgttactactttgaccaaaaaaatggcggaagacttaaccgattatttgaaggacttaggaattaaagtacgttatttgcactctgatattaagacgctggaaagaatgcaaattttgcgtgacttacggttaggtaagttcgatgtcttaattggaattaacctgttgcgggaaggaatcgatgtaccggaagtttcactggtagcaattctggatgcagataaggaaggcttcttgagagcatatcggccgctggttcagactatgggacggaccgcccgtaatgccaatggtgaagtaatcatgtatgctgatacgattactgattccatgagagcagcgattaaagctaccaagcgtcggcgtaaaattcagatggaatttaacaaagagcatggcataacgcctaagacaatcattaagccgattcaagacgtaatttcgattactaaaccgtcgagtgaaaaagaagaaaaatctgatagttttgcagatcttaattttgatgaattgacggctaagcaaaagaagacaatgattagcaacttgcaagagcaaatgcaagaagcagctaagaagcttgactttgaagaagctgctaacttgcgggatgcaattatggaattgcaaaaatcatcaagaaaaggaaagaattttaatggcaaatgataagatcgttattcgcggagcacgtgaacataatttaaaagacattaatttaactattcctaaggataagttagtagttattactggcttatctggttcaggtaaaagttctttagcctttgatacgctttatgcagaagggcgtagacgttatgtgcaatcactttctagttatgctagacagtttttggggcaaatggataaaccagatgtggattcaattgatggtttaaatccagcaatttcaattgatcaaaaaacaacgtcacataatccacggtcaacagttgggaccgtcactgagattaatgattatttacgtttgctttgggccagagtaggccatccaatttgtcctaatgatgggacgctgattcaacgacaatcagttgatcagatggttgaccgagtgatggctttaccagaaagaacgaaaattcaaattttagcgccagttattcgtgctaagcgtggagaacacaaggaagtatttaagcgagtgcaacgtgcaggatatgttcgtgtaattgttgatggtgagatgcacgaaattggtgaggattttgaattagctaagaacaagcgtcactcaatcgatattgtcgttgaccgtttgattgttaaggatagcattaagtctcgcttatttgattctattgaagctgcacttcgtttgtcagatggctacatgaatgttgatgtaattggtggtgaaatgcttaacttttctgagtattatgcttgtccaaagtgtggctttactgtgggtgaaatggaaccaagactgttctcctttaatgcaccatttggtgcctgccttgattgtgatgggttagggatgaagttagcagtagacgaagatttggttgttccggacaaaacaaaatctttagctgaaggtgcactggctccatggaagacttccaattactatactgaaatgttggaacaagcttgcacggcattaaaaattccgatggataagccttttaataaactaactaaacgtcaacgcgacattattctgcatggctcaactaagccggtgaaattccatgtaactggtgactttggcgttaatgataccgttcaaccatttgaaggagtaatggccaatgttgagcggcgttataaacgaccaatgtccaagtttatgcgtgatgtgatgggcaaatatatgactgaacttacttgttcaacttgtcacggcaagcgtttgaatgaaaaagcattagcagtgaaagtcatgggcaaggatatcgcggaagcttcggagctttctattgataaagcacttgatttctttaaggacgtcaaattaagcgagcaagagactatgattgctaagccgattttaaaggaagtacgcgatcgtctttcattcttggatagtgtaggattagattatttaactctttctcgatcagctaataccttgtctggtggtgaagctcagcgtattcggttggcaactcaaattggctcaaacttatcgggagttatgtatgttttggatgaaccatctatcggtttgcatcaacgtgataatgatcggctgattgcttctttaaagagaatgcgtgatttaggcaattctttaattgtggtagagcacgatgacgaaacaatgcggcaagctgactatttggttgatatgggacctggtgccggtgtttacggtggtaaagttatggcacaaggaactcctaaagaagtagagcagaatcctgattctttaacggggcaatatttgtctggtaaaaaatttgtgccggttccattgaagcgtcgtaaaggcaatggtaaaaagattacaattactggagctcaagaaaataatttaaagaatattaatgttgattttccgttgggcaaatttattgtggtcagtggtgtctcaggttctggtaaatctactttggttaatatgatcttgaaacgcgctttagcccaaaaattaaacaataattcaactaagccaggtaagtataagtcaatcaagggttacaagaatattgaaaaaatcatcgatatcgatcaaagccctattggtagaacaccacgtagtaatcctgcaacttatactagtgtttttgatgatatcagaaccttatttgctcaaactaatgaagcaaaattgcgtggttatactaaagcaagattttcgttcaacgtcaaaggtggacgttgtgaagcctgtcatggtgatggaattatcaagattgaaatgaactttttgcctgatgtatatgtaccatgtgaggtttgtcacggcactcgttataattctgaaacattggaagtaacttatcggggaaagaatattgctcaagtgcttgatatgacgattaatgaagcaactaagtttttcgaaaatattcctaagattcagcgtaaactccagactatcgttgatgtaggtttgggctatgtgaaattaggtcaatccgctacaactttatctggtggtgaagctcaaagaatgaaattagctgctgaattgcaaaagctttctactggtaaaaatttctatattcttgatgaaccaactaccggtttgcataccgatgatatcaagcgtttattagaagttttgcagcggttggtagatgaaggcaatacggttttaattattgagcataatcttgatgtaattaaaaatgcagattggctgatcgacttaggtcctgaaggaggggaacgtggcggtcaaattgtggctaccggtacgccagaagaagtagcgaaagttaaagaaagctatactggtcagtatttgaaaccagtcttagaacgtgatactaaactaacaaaagaagcaaaaaaataggctagaagacaatagccaatagtttttattaaccttgaataagtgtaaaatagtctgcaaggaggaataaaaatggatattttttctagttctagagataatcacggctttgactggggcgcatttattgccggtatcttaatggtcgtagttgcgttcgtgttattacgtcacccagctaaagggttgcatgcatttgtcttgatttttgctattgtatcaatcgttcaaggtattgtatggttggctgcttactcacgctttcgtgaatttttctcacgtagttgggtagcaattgtgtcaggtgtattagatatcattatcggtatcttgttcatttgctcatatgatattggtggtttgactatcgcttacttatttgcaatctggttctttgttgattcagttgtaggtattgcttggtcatggcacttacgtgcattttcaaccggatactttgtatttaacttgattttgaatattttaagtttgattattgccttcttcttaattattaatccagtaatcgcagccttaagcttagtatggttagttgcattctggttattagtctttggcattaatgaaattgtggttgcatttatgcaccgttaatatttgataaaaatttaagccgaaaggcttcttttttttgcacaattatgacacacccggtatgatataatttgtaaagaggaggatttcagtatggctgatgagaaaaaacaattattaatagtcacaggcatgagcggagcaggtaaaactgtggtcgctcatgacttagaagatatgggctactttgtagtcgataatcttcctccaactttattaggtagtttttgggatttaattaataattccaatgactttcataaggtagccgtagtaattgatttacgagttaagacattttatcgcgatttattggatgaagttaattcacttgaagataatggcaatgtgcaagctactatcctatttttggatgcttccgatgatgtcttggttgctcgttataaagaaacaaggcgtcttccgcctttagccaataatggcaaaggtcgcttgcttgatggcattcaagaagaacgtcgtattttaatgccaattaaaaatagatcaaattatattatcgatacgtcaaacttgtcgactaaggaattaaagcaaaaattaatcaatacatttagtgatcgcaagcggcagccattttcaattgaagtgatgtcatttggctttaagtatgggatgccaattgatgcagatattgtaatggatgtgcgttttttgcctaacccattttatatttcagaattaagaccatttacgggactggacaagcgtgtatttgactatgtgatgaacaaagaagaaacacaggtcttttataaaaaattgcttgatttgcttgaaacagctatccctggatatatcaaagaggggaaggaaaagttgaccattgcaattggttgtactgggggtcaacaccggagtgtttcaattgcccaacagttggcacgagatttagctaaaaaatatccagtcgatattactcaccgtgaagtgagtcgttatattagaaagtaggtgcgcacctgtgccatatggagaaacaaggattgttcgcgtgattaaaggcagacgtccccgtgtagtcgtaattggtggcggtacgggtttaccagttattttgaatgccttaaaagatcaaaacgcggaaattactgcaatcgtaacggtttcagatgacggcggttcatctggttcaatccgtaactttattaacgtagttccacctggtgatatccgtaatgttttggtatcacttagtgacttacctcaggaagaaaagaatatttttcagtatcgatttgattcatccgattcctttttttcaggacatgcaatcggtaatttaattattgcggcattgaatgaaatgcatggcaatatctttgatgcagttcaatctttgtcaaaaatgatgaaaattgatggtcatgtttttccagcatccaatgaaccattgactttaaacgcagaattcgtggatggaactacggagtctggtgaaactgaaatcacatctaaagataagcggattaagcgtgtctgggtgaccgatactgattcggatgaagagcctagagctgttttaccagtactggcttcgattatgcaagctgatgcagtcgtacttgggccaggtagtttatttacttcaattttacctaacttaatgatctctaatttaggtgaagcagtgcgtgagactgacgccgaggttatttatatttgcaatatcatgactcagcgtggtgagacagatcactttagtgatgcggaacacgtacaggtaattaacgatcacttaggtggaaattatatcaataccgctctggttaatggtgccaaaattgatatgagcaaatttcacccagaagattatgatgcttatcttgagcctgttaagaatgactttgaaggcttaagaaagcaaaactgccgtgtcattactgatgactttatcgatcaacgtcatggattggtatttcatgatggtgaaaaggtaggaaaagaaattattaatctggcatttgaatcaatgtcacgtaaaagaatgaaggaaaatgatggctagttatgctagtgaagtcaaaaaggagctaacttcgcttgaggtgcatccagagcatgccaaagcagagttagctgcttttttgcgaatgaatggtgtattaaacttgcacgatcatcaatttagcctagatataactacagaaaatcctgcgattgctcgacgaatttttaagctgattaagattgcttatggtattgagccattgctgattgtctcgcgcaagatgaaattgaaaaaaaataatcaatatttggtacgattgaatcagaaggtacaagaaatcctagaaaacttacaaatctgggatcctgaaaaaggtttggtaacgcgaattccgcagagaattatgacttcacgtgaaggagcaatgtcctatttacgcggtgcatttctagccggaggtagtgtcaataatccagaaacgagtcgttatcacttggagatttattcaacttatgaggaccataatgaggatttatgtaagttgatgaataattatttttatttaaatgctaaagcaactaaacgtagaagaggctatattgtttatttaaaagaagccgcaaaaattggcgactttttgcatatagtgggtgcacttaatgcaatgcttaactttgaagatttgcgtattatgcgagatatgcgaaattcggttaatcgcttggttaattgtgataccgcgaatatgaaaaaaacagcctcagcttcagctaagcaggtagaagacatccagctgattgaacaagaaaacggcttagatgatctaccagagaaattgcaagttttagcgcgttttagattggcgcatccagaattaactttaaaggaagtagctaatcaaattccggatggtccgatttcgaagtcaggagttaatcaccgatttaagaaactacatgagttagctgagagtttaagagaataagaaaaaggagcctgcacaatgagtgcaagctccttttagagtgtgaataatttttaataattaattacttcttcttattaaccatgatttcgtcaatcaaaccatattccttggcttcttcagcagttaagtagttgtcacgttcagtatccttttggatcttttccaaaggttgaccggtagtttcgtgcaaaatttcgttgatcttcttacggctcttcaaaatttcgttagctgcaatttggatatcagtttgttgaccttgagcaccacctaatggttggtgaattaaaacagttgagttaggaagtgcgaaacgcttacccttggtaccactagtcaaaaggatagaagccattgaagctgccataccaattgcaatagttgatacgtctgacttaataaagttcatggtatccatgatagctaagccggaggtgattacaccacctggtgagttgatataaagtgaaatatccttggtattgtcttgagcatcaaggaagagtaattgagcgatgattgagttagccatttggtcattaatttcaccgctaagcatgataattctgtcttttaataagcgtgagtaaatgtcataagcacgttcaccacgagcagtttgttcaataactgtaggtactagcataaatttgcctcctaattgatttcgtattaattagcactctttcaagtacagtgctaattaaatcacttcgtaatgaaagtgtcaaataaagaagctcaatggtaacaatggtaataaaaatgtattttagctaacagtgtttatatattataatataaaagtaaaatgcaaaatataagatacggaggataggtttgaagtattcaaataaaattttaactgctacttcagctgtagcactgggtgttggtttgttaattggttctacaaatgcagtatttgcagataattctaaaactactgatagtaatacagatactgctaagactgattccagtgcgaagaagggaccagctcaaacaagtacttcttatgacttaatggttaaagtaggtagcaataagaattatcctgtttataaaaagattagtaatggtaaacctagtggtaagattgctgatgctagcgattatcaatatgctcatattcaatctgaccagagaattaagacaaaggatgcaacttattggcgtatttatgtaaatggtcgtaaagttggttatgttaaccaaaactactttacaagagatgctatcgctgtaccaaagactatcagtttagtacaaaatagtcactacgattttgatccaactgatgcagtaagttatgtaaccaattatatgggtactgtaattgatacagcagatattaagatttcagaagatgcaatcgattgctcaactccaggtacctataatgttaaatatagctatggtaaagcaaaggcaactgttaaggtaactgtcagaaagagtactaaggaaggaattgctgatgctgatagcgtccaagctaagccatttaacggcgatttgaaatcctggaagacttactacggcagttctgctaactatgtaactaagactgattttactcctgataagaataagcatgcttatgatagtgaaagcggaaaattagatttcactactcgcttcttccaaccagttttattaagtgtttaccgtgacattaaaaatgatgactatattaaccgtgtaggtcatattcctgaaggaattaccatgtcaaatggctggttgtacactagtttattaagtagtaccctgattagcaatggtcatattgtaggatataatcttaaccatttaaccaatgcatttaacggacaatacttacttgatatgagccaaaagaagttcaattcttacgttaagaacattaaagttagtccatatattccaattggtcacggtcaagcaatgggctcaactgataaatacatttacgttctaaataacaataataaggtttcatacaagagcaatatgtctgaagagttaatccaaattcggaagagcgatatgtgcattaacaagatttggactattaaatgctggaacggtagtgattcagacggtcgttacttcaataatggtgttgttgtaaatgatcacaagctttacacaactctttataataaagaaaaagaccaaactgaatactgggaattcaaccgcaaaggcgataactggtatccaactatggtaggtgcaactaagggtggcattgtagcaaacacatacactcaagggtttacttatgatgccaagaacaataacttctaccttgcattcaatgacgtaattgctaagattgcaactgatggtgaagttaaggatacttaccaataccacactggtcgtgaaattgaaggtatcgcaacctacaacaacaagttatacatgaacttagctcaacgtgctgaattacttgaaagtaaacaaaagttgactaagtaatcattatcgatattaatttaaataaaggaaattcaatgaaaatattggatttcctttatttttttagttgtataattagaaaaatgagttatttagttaggcaaaagaatgaaaatattagaattaaaacatatccaatatagtgcagataaaaaacaaatattgcaagatgtatcatttaaggttaataaaggcgattttctaaccttaattggcccatcaggtgcaggaaaaagtacgattttacgattgattgcaaatttaattagtgctaattcaggcgatattctatatcaagaaaaaaacattagctccttaaatccagttcaatatcgtagagaagtttcatattgttttcagcagccgtctttatttgggcaaacagtaagagataatttgattttcccgtatgaaattagaaaagtagatgtaaatgacaagcaaatagctgatttacttaatcaagttgatctctctgctgattttttagataaaaagattactgctttatcaggtggtgaaaagcaaagagttgcgttaattcgaaacataatatttttaccaaagatattgctcttagatgaagtaactaccgggcttgataatcaaagtaaagatattgtacataatttgattaaggatgtttctgagaaaggcgtgacaattattcaagttacacatgatcaaagtgaaattgatgaagcaagtaatattttaagagtaaaaaaaggcggaataatcgaatgaaaaatgttgtagttagcaactggtcgttagtattagcttttgcactggtgttagtttccattggaatttctgcgaaagaaaaattaggactaaccaaggatattttaattagcgtgattagggcgataattcagttagtcgtaatcggctacgttttgaagtttatttttcatgttaatgccttgtggctaactttggtttcaactattgtgataatttttaatgcatcttggaatgctaatcagcgtgatcctaatccggggcggaatatttggaattcgataatagccgaagcggtagggacttacgtgacattaggaattctgattttttctggcgtaattaaaccagtccctatgcaggtcattcccattacggggatgattgctggaaatgaaatggtggcagttggcttatgctataaagcgttgaatgatagctttaatgatctgcatcaacaagttttagaaaagttggctttgggtagtgatattaaaactgcatcgatgccaattttaagaaggagcattaagactgcgatgcagcctacgatagattcggctaaaactgtaggattagtaaatttgccaggaatgatgtccggcttaatttttgctggtgtaaatcccatttatgcaattaagtatcagattatgattacatttatgttactttctgccactggccttggagccgtgattagtggctatttggcttataaaaattactttaatgataggatgcaattgaaataggcagtatgataaaaataattttctacatttagatttagttaaattatatttcataagcgtttgtaaaggtgatttaagttaacttaaatcatatggtaaaatttgagttaaaatgaatttaatttttctagctattgtaaatatcaattttgtcatgtttagataatttagccataaataaaaaccccgaaattcatgtccgaatttcggggttcatatcatgatcaaagtttgagcttcattattttattgggctgatttttgttttaaaaactgctgttttttcatcatttgtttttgcaactgcttggcatcgttaactgacattactttccagttggagggaatagaaaaaatatattctctgtgttttaactccttgtcatgaccaaagacgccaaacattatttgattaaaggtattgctataggtgtagcgagtagtcttaatcgttacttttggttggctgcttcgttttacttttgtcgatactttatctaatttaatacgcgtggtgctagttaaatcgttctagacaataagccaaattataagctaaaattgcaatttccaaccggctttgaaagcctatcagactacgtgctcgattgttctcggcattgtaataggtcagaagcgaaaagtcgctttcaattgttctgcgaatagccatcaattgatgatcattgtgctttttagctcctgtcatatttttacgatatggtgtccaaagttcgtaacccatttgttttagctgttgacgcagttctttgcctaaatagccttcgtcgccaagaagatagtaattagatggatgggtattttctatcagttcaactgtctccctggcatcatgaactgatgcctttgttacgacataatcaagaatgtaaccgtcatcgctaacaatggcatgaactttgaaaccatagaagtaaattttcttggtggccttataaccaatgttggcataaccgcgaaaaattttagcacgatagtttcgaattggttggcaaacaggtaccggaaagctgtcaatgatcaagaactgtccattcaggtcaacctttttattcatttcttgccgtatctgataaatcaattgcaatagctgacgtgaacgccgattaaaacgtgagtgtgataaacaattgaaacattcacagaatcttctttgtgattcaattcctgtcttagcttgccagataagtaaagccaaaatcagactgtccgtagttttaatttgatcaatatttcgccgatgagtaaactcagccggtgcatacaaacgataccagtgccgacaaattatcactaaatctttaaaactaacttgtaaatggtggctaaaacgcttaagcttaaggcagttcaatcagatcagactcttttctattattactatttacaagtcgagtctaacaagattggacttttttattaactaaaacgatttaactagcaccacgcgtaactatactgtaaggtggtatcaggatgaaatctaaaaaaattatgcatgacatttttcaaaatttagaaattggaatcggtgaagttagtaaattgaccggtgtttcgcaaaggcaattgcgctattgggaaactaagggctacattaagccgatttcagatgatcaaagtggtgtgcgccgctataatttagcgaccttgtatctaattgtttttatcaaggaacaattagatgagggctttacgttgtctgcagcctttgagcattcaaaggatatacggttgaagagtagaattgttcatcaatttttcagagaaacttttgatgatgttaaggttactgattctacaaagggctatggggaaattgacttaggtgaatttcaggccgaagatggcagcatgcaccatttcaaaggtgttgtagatgaaaaaggacaatacgttaagatggatggataatgcaatttaaaaggaaaatcttccattagtgtatgtgctacaattaaatcgtagttcacatatattaatatgggagaaaaagaatgaaaaaacgatttttaattgcaggtgcatcagctgtgatgatgaccttatctttaacggtattgagttccaagccagttaaggcagccaaaaatgccgttgattttatgacatatctatctaaaaacaaatctttgactaaagggcaaagaagctctgctagatcagcagtgaaattattgaaaacaggtcgcttaggtaaaaagcctaaggcaagttggtacaatgaatacgttgacttgcattcaaatgatgatgcaactagtgctaagaatattaaagctgtattgccttatttgaatagtgtcaatagagcacgtagaagtgaaggggttcggtcattaaaggtgtcaccacttttgacagcagcctcaatgttaaatgctgactatcaaaaacgtggtggcttaaagcatactcattatttcaagtcgattggtttggaaaacatcgctactcaaagtgtgggtttagatccggttgatacttggttctctgaaaagaaaagttggaattatgatgtaaaaaagaatcattcgttgaagccggcgaagtatagtccaacttggacggcaacttatgatgcggccgtagagggcacgaacggctataaaatggcaggacactacttgaatttgattaacagaaattatagagtaatgggatttgccaatgtaagcaatactggttatggaaatgctgattcatatttaggaagcagtaaaggtgcaggaattagcgttgccaagtacaaggcattggtaaatgcttgggctaataaataaaaatatacactaaaaaggaagcagtcttttgaaattgcttcctttttaaaattctgtatttaaattttattttgcctttgcttcttgatatttcttaattcctggcaaaattaaacctaatgcaatcaagacgattggcgtcaagatattaaggaataaggtaaatggatctggtgagtaaatacccaagatacaacatgcagcagtaactacaaaacaccaaataccggcagtataggctaagccttgatgtttagtcatttgataagtagtgttgaacttttgctgctgttttcttaaagcaacatatgccgcaaatacccaaaggtaacgaagtggcatagtagttgaatttaatttaactaattgtgccataacagcttgagcatttggtactaaagcttgaatagcaattaagccaccagagaggacaacaaccatccagataccgttgatgtaagcaccatgcttgttgagttttaataagccctttggaataaattctttagcttctttactacccaaaagcattctaagtggtgcatcgatactgattactaatgttgagaattgaccgattacgttacaccatgaatagatgtacatgaacaagccgccaacatggtaatattcgcccagcttgtcaaatgccatgtaggcaccattagagatgtattcgttaaggttggcattaaccaccttagggtcaaacattaatgccatggcaaaagtacctaaaatagcagataccataaccatgattgctaaagccatcatagccttagggaagtttttggaaggatccttaaccttattaacataaggggagatcttttcacaaccaccaacggcaaatactaggattgaaagagaagtaaagtattttacgttgaaggttggcatcaaattcttccagttaaagtcaatactgtggaaaccagcagaaggattaatagctggtgcggcaaacatcataatgatgaataagattgacatgataaacattgaagaaccagcaattgttgctaggcctttcaatactggaataccacgacttgcaacccaacagaaaagcaagaagactactaatgtagcaaattgtgtccaagcggtaggtaagccatcataccattttgtatttccgaagataccccaggccatcgctcttaaaccaccagtacctttactggaaatataaacaacgtggcaagcccagtaggtccaacctgcgtagtaggcccattttgcgcccatagtggcatttacccaagaggaaaccccaccttcagcattcttgaaggtagctccaagttcaccaaccattaaggcataaggaacaaagtagagaaggaacatgacgatccagctaaagacaacctttgtcccgtcaaagtagacgtacccattaacaacgttaccaaagccccacacggtagagaaggccatcattgctagggtggtccacatcatctttttggaattattttgtgattcgaccataaaatttctccctattactatttatatatttatgtgaactttttaattatataacagaagcgttttcaaagtcttgttgttcaggaaattttttaataattagatgtttcatttgataaatttgtgctaaaatgaacgtgattttttcatatgggaggattaataaggatgttaaaagggaaaaagatgttattaacttttgtggccagtgctgcattagttggtggtgtttttgccattagtcaaagcaaggtagatgccaaaagctacagcaaggcagttactaagattgctggcaatggtaattacgctatttatcataatgtatctaaaaaaggaccatcaggtgcattttcaaataccaagtactttaagcatggtcaaattcaatctaagaagtatgtttctaccaagaaaggtaacttctggtacattattgtcgatggacgcaatgtaggttgggtaagtcaaaacttttttgctagaaaccaaatttcagtagctcaagatgttagcttagttcacaacagcaactacagttttccaactagggatgcaattaactatgcaacagatggacaaggtactgcaattaatccagatagggttaatgtttcacatagctctgttagttcaagccgtgccggcactactaaggtagattattcatatggtaaggcaaaggcaagcgttaatgtaactgttcgttcagatacaaatgaaggaattactagtgcaggtgcttctgttaagagtggtcctaaggcagttcatacttggaatggtggctcaaagggatcatcaagaaattggaatcaggcacacggttatcgttcagaaactagctcaaatagctattcaggtaacggcatgactttgcgcactcgtttgttccaaccacgttttgtcagcttaggctatggtcaagctgctgatgcaatgggacaagttggggtaattcctgaaggtattactgttaatgatggtatttttacagcttctatgtacactagcagtagcgactcaagaggacatcttgtttcttacaacttgaatgcaattaagagtaaatatgctgctcaaaacttaactactatgggatggagcacttttagaagctacgcaaacaatattaaagtttcaccatacattaagctaggtcatggtcaatcacttggctcttcttcaagctacatttatgttttggctaataacaataagactgctaattcaacagcttcagaagaaattatgcaagtaagaaagagtgatatgaagattaacaaaatctggactgttaagacctggaacggcagcagtgcatatcctcgttacttccataatgcaacctttgttggcgacaacactatgtatgcattgttccacaatggtggtcgtcaccaatatgaatactggaagttaactagaaatggtgacacttgggctccagaagaaatcggtgctactcaaagtaatttcgtaactggttcaccagttcaaggttttgcttatgacagcaaccacaatcaattctatattggttttaacgactacatcttccgtgtagcagcaaatggtacttataagggtagccatcatttcaacactcgccgtgaaattgaaggtttatctgtttcaggctcaactttgtacactgagttagcacaacgtgctgagttgatgactacaagcactaaataattgtgatattgaaaaaggcattccgtgaggaatgcttttttggtataaaaaaagaagaataccgagatggcggtagtcttcaacatgtagttatatgggccccctgggagtcgaacccagattctaagaaccggaatcttatgtgcgatccattacactaagggcccagatgattcacaagtggtagtatatcaaaaaaagtaatgaaataaaaatgattttactcgatttacgacttttttaaaatcgtgtatctttttcttgaattacgaaaaatacattgttatactaacagtgtcgattgggaaatgtatgaattgaatgaaaagtacgtttctcttatatttttaagcattctgggacacaaaacgacacgtaggtggtcgatagatgtcccatggaaaggagggaacgatggattcggacttttctttgctcgaagcgctcgttcccgacgtcttaaagattcttcgacaaaggtatcttgtccttgagcagatttcgctacatgcgccaattggacgtcggagtgttgctcagcatttagggctttcagagagaaacatcagaactgagactgagtacttatgtcaattaggattgattgaaacaaaaagttttgggatgtttttaactgaaaagggtgagaaaacattaaaagatgcaggaccattgcttgatcgcctctttaatgccggtgaaacggaagtagcattagccaaaaaattagggattgaaagaacattgatcgtccctggtaatgcggatttccaagaccgagtatatgaggagatgggagaaaaattaagttcagctttgaatttactcttgcctttaggccattcaatagttacaattctaggtggagcggcgttagctagatctgctaagtatttatcaccagatttagctaacaatcgccagttggaatttgttccaggtcgaggagctttgggcgaaaatgtagagacgcaaagtaatacaatcgtccaagaaatggctgctaagacttcaggtacttataagacattatatttacctgagcaggtttcagatgatgcttacaaatctttgattcgtgagtcctcgatcgcagatgttctgcaagacatttctcaaagtgatgctgtgattcatggtattgggttagctcaagaaatggcacagcgcagaggctataattcaattaagctatctgaacttcgtgagaagagagccgtcaccgaatgtttcgggtgtttcttcgatgaacatggcaaggttgttgaccgcatcacccaggttggattgcagttcgagaacctatacaaaataccccacatatttgcttttgcttgtggtgcccgaaaggctcaagcaattaaagcttatatgcctaatgcgcctcatcaaacctggctaatcactgatgagggcgcctcaaatatgattttaaaggggaaatgaaatcccgtttaaaataaatgttgtttatagttcttaaggaggactttaggttatgacagttaaaattggtattaacggtttcggccgtatcggtcgtttagcattccgtcgtattatggaccttggcgaaaagtcaaaggacattgaagttgttgctatcaacgacttgactactccagcaatgcttgcttacttgcttaagtacgacactactcatggtactttcaaccacgaagtttcatcaactgaagattcaatcgtagttgacggtaagagttaccacgtatacgcagaaccacaagcacaaaacattccatgggttaagaacgatggtgttgacttcgttcttgaatgtactggtttctacactagcaaggctaagtcacaagctcacatcgatgcaggtgctaagcgtgtattgatctcagctccagctggtaacgacttgaagactatcgtttactcagtaaacgaagacactttgactgctgatgacaagattgtttcagctgcttcatgtactactaactcacttgcaccaatggctaacgctttggacaaggaattcggtatcgaagttgctactatgactactatccacgcatacactggtactcaaatgactttggatggtccttcacgtagtggtaaggaacaagacgctcgtgctgctgctgaaaacatcattcctcatactactggttcagctaaggctatcggcttggtattgcctaacttgaacggtaagatgaacggtcacgcacaacgtgttccagttccagatggttcagaaactgaattggtatcaatcttgagcaagaaggttactgctgacgaagttaacgaagctatgaagaagtacgaaagcccatcatttgcttacaacggtgaccacattgtttctagcgatgttcttaacatgactgctggttcaatctttgacccaactcaaactatggtaaccactgcaggtgacaagcaattagttaagactgttgcttggtacgacaacgaatactcattcacttgccaaatggtacgtactttattacactttgcaactctttaatcattaattttaattaactgattatatagttaagtggtaattgagaaggcggagggagattcttccttccgcctttttttgaagaaaaaatatcaaaataatcggaggattataatggctaaattaatcgttgacgatcttgatgttaaaggcaaaaaggtcttagtacgtgtagactttaacgttccaattaaggatggcgttattggtgacgacaaccgtatcgttgctgcacttccaactattaagtacatcattgaacacggtggcaaggctatcttacttagccacttaggtcgtgttaagtcagatgctgacaagaaggaattatcattaaagccagttgctgaacgtttaagtgaacttcttaagaagcctgtaacttttgtaccatcaaacgaaggtaaagaagttgaagacgctatcaacaacatgaaggatggagatgttatcgttcttgaaaacactagattccaagacatcgacaacgactttggtaagcgtgaatcaggtaacgatcctaagcttggcgaatactgggcaagtcttggcgacatgtttgtaaatgatgcatttggtactgctcacagaagtcacgcttcaaacgttggtatcgcaactgctatgaaggaagctggcaagcctgcagcagctggttacttgcttgaaaaggaaatcaagttcttaggtgatgctgttgaaaacccagtacacccattcgtaactattcttggtggtgctaaggtttcagacaagattggtgttatcgaaaacttaattcctaagtcagaccatattttaatcggtggtggtatggcttacacattcttagcagctcaaggccacagcattggtaaatcattatttgaagctgacaaggtagaccttgctaaggaattacttgctaaggctggcgacaagatcgttcttcctgtagataacgtagccgcaactgaattctcaaatgatgcttcacgtgaagttgttggtgatgatattcctgacaacatgatgggtcttgacatcggtcctaagactgttgaaaagttcaaggaaatcttgaaggatgctaagactgttgtttggaacggcccaatgggtgcattcgaaatgcctaacttcgctgaaggtactttggaagttggtcgtgcattggcagaccttaaggatgcaactactatcatcggtggtggtgactcaactgctgctgctaagcaattaggcattgctcctaagattacccacatttctaccggtggtggtgcttcacttaactaccttgaaggtaaggaattgccaggtatcgcttgcgtttcagacaagtaatagtaaggaaaggacaatagattaatgagtcgtacaccaattattgctggtaactggaagttacatatgaatccagaacaaactactgaattcgttaacgctgttaaggataagttaccagacccaagtaaggttgaatcacttatttgtgcacctgcagttgaccttgacgctttgagaaaagctgctgaaggctcaaacttacatatcggtgcagaaaactgttactttgaagacgaaggtgcttacactggtgaaacttcacctaaggtcttgaaagaaatgggtatggactacgtaattattggtcactcagaacgtcgtggttacttccacgaaactgacgaagacattaacaagaaggctaaggcaatctttgctaatggcttgaagccaatcatttgctgtggtgaatcacttgaaactcgtgaagctaacaagcaagaagactgggtagttgctcaaattaaggctgctttagacggcttaactgctgaacaagtatcttcacttgttattgcctacgaaccaatctgggctatcggtactggtaagactgcttcatcagatcaagctgaagaaatgtgcaagactattcgtgaaactgttaaggacttgtacaacgaagaaactgcagaaaacgttcgtattcaatacggtggttctgtaaaaccagctaacgttaaggaattaatggctaagcctgatattgacggtggcttggttggtggtgcttcattagtaccagaatcattcttagaattggtaaactaccaagactaattcataaaaaataatttagattaataatctagaatttttagggtcaaatcattagatttggctcttttttatatagtttgatagctaaaaacaagttcgttgataaagtaaataaaaatgatcaagccattgataaatcacttgatcatttcactatattttttaatagaaattaaagtcgctgattgtaaaattaaattgaacacttaataaaaaataaaaagtccattcggacctgtttgatagaatgtagttaccacacaacatttagaaacgaggtcaaaatggactctttacattctaccatgaatcatcacattaaaggcaagcatttatcattcgaggaaagagttattattcaattgcgtttgaaagatggctattctttgcgtgccattgcccgtgaattaaactgttccccttctactatcagttatgaggttaagcgcggtactgtagaactgtatcatggcaaagtcaaaagatataaggctactcaagggcatgatgcatatcaagctcatcgtaaaaattgtggacgtaaatcagactttctcaggaaaactcaattcatgcgctatgtccacaaacatttctttaaagacggctggtcgcttgatgtgtgcagtaatcgcgccaccgctgttggcgcatttagcagcagagatgttgtctgtactaagactctttacaattatgtcgaccaaggtctattagatatacataattacgacttgccagagaagcttaaacgcaataccaagcttcatcgtattcgcagaaataagaaaaaacttggcagaagcattgaagaacgtcctaaagaaatcaataaacgtaatgagtttggccattgggaatgcgatttagttctcggacataagagcaaagatgatgaggtgctgctaaccttatctgaacgtatgagtcgtgagttcttaattcttcgtattcctgacaagacttctgtcagtgtcatgcaggcctttaaagaactccaaaggcaatacagcgaacattggaatgatatttttaaaaccattaccactgataatggctcagagtttgcagatctttcaagcttagaagacgtatcaaatactttagtttactatgctcatccttatacatcttgtgacaagggaaccgttgaaagacataatggactcattcgcagatttattcctaagggagaggcaatagacaattattcactacaagacatcatagacattgaaacctggtgcaactctttaccaagaaagatattggcatatcatacaccagatgaaatctttgaaagagaattagatctaatctatcaagcagcttgattaaaagtgttcaatttattattgcaatttacgtagaaattaaagttgtcttgtttagaaaaatagatgtactaagttaaataacaaattattaagctataagctagctctaaatgcattatttagctatctttaaagtaaaataataacatctagcccttgtatttttggctgaacgaagtataataagctatggaggttgaatcaaattagatttaactttcattattcagtctctgcctaataattccttattacttaataaatataaactttatggcagaagatacatctatatctatatcactttctagaagagcagttatgaaaattttcatgactgcttttttgtttaatttggatttacctcaaatccaattggcggaaaactaggcagtttcaaaggcgtaacatgccattgtgtaaatagaacggatgtcaaaagaataaaggggacgtcttcaggcttagtaatatcacaaattaaaacgcctccgcgatctcccatgattgtttggacacttgctacactcttgattccagaacgaaaagtataagtaccacgtttaatactacctgtaacaatatactttaattgggtcaaatagaatatgtttgcagtaggtgtgtttaacttttttacgcctactaaagagtggttgacgacatcaattgtgaacgaagcaattaggcccgcaccatcagaaaacagacgtcccacttcctgtttacggaaattatttagatataaagtgtggtttggattatcaagattgccttgaataaaaaattcagcttttccattttgattaagcacaggaatttgaccgtaatccttttcctgattaagttctagccaaaatcgcatacttactcacctcataactttaaatattgttattatctgcaataaatttatttaaaatataagctactccatcttcattgtttcgcttggtgactacctgagctattttcttaatagctggaatcgcattacccatcgcaacgccagtacctgctgctcggatcatactctcatcatttaaattatcaccgattgcagcgatttcctcaggctcgataccttttaacttggcataatcaagtaaggcaagacctttttgagcatgttgctcattgatttcaatattagaagatgaacttgaagttactactagatcgcccattgtagcgatttcttttttgatatcggtaaaagcttcatgtccccgagagtcaaaagcaataattttcattacttctattttaggatcttgcaataaattatcgaaactgtggatttgtttcatattcataatagtcttattaccagcagaaattgctacagcttgacgaaaatcaagtagaggatttagatctaccattaaatgagctacatttgaaatacgttgatctagattttcactataaacctgattggcagttaaaatttcaaagtaaaagcctgatcgatgtagtaaatgcactagctgttgtgcttttgccttgggaatactgtgtttgatcattaattgctcattttcgtcaaaaaccagggcaccattaagattgataaaactggtatgcaaatcagcatctttgagaactgaacgtgattcgcgtggggcccggccagtcgcaattaaaaattcaatgccgctactttgtgcatttttcacagcttttgcattagcagcagaaacagccatctctgaattaaacaacgtgccgtcaagatcacaagcaactaatttgatcataatttctctcccatttagtattaaattaatgataccataaagaggagaagaaaagagggtgtaagacttggctaaagaattaattggcaacgattgggatcaagtattggatcctgtttttgcaagtgagaaatatcacgaattgcataattttttaaaagaagaatattctactaaacaaatttatcctgatatgtatcatatttttacggcttttaaattaacaccgtttgctaaaactaaagtggtaattttgggtcaagatccatatcataatcctggtcaagctaatggaatgagtttttccgtcatgccaggtacaactttgccgccatcacttaaaaatatctataaggaactctatgatgatgtcggagctcggcctgttaatcacggttacttaaaaaagtgggccgatcaaggtgtgcttttgctgaatgcggttttgacggtaccgtatgggcatgctaacggtcaccaaggcaaaggttgggaagatgtgactgatactgcaattaaggctctgagtgagcgtggaaaagtcgtctttattttgtggggtcgatttgctcaaaacaagattccattaattgatcaaagtaagaattttatcattaaatcatcacatccaagtccattttcggctgatcgagggttctttggctcgcgaccgttttcgcggtgtaatatggcattgaagaactttgatgaaacgccgattgactggcaattgccagaaacgataagtaaatctgatttagcataagaggtaaaaaatgagcgtattttcattattcaaaaaacaagttgaagcagcaaaagataagaaaagaattgtttttccagaaggcgatgatttaagaattcttactgccatagctaatttgaaaaaagatggcattatcgaaccaattttaattggaaatccagatgagattgctaagttagttaaagaaaataatttagacttagctggtgttaagatctatgacctcaatcattatgatgaacttgatcaaatggcagcggaatttgttaaagctagacgaaaagataccagtattgctgaagcaaagctcaagttagcccaaggtaattactttggtaccatgttggtgaagatgggaaaagcagacggtatggtttccggtgctgctcactcaacggctaacactgttttgccagctttacaattaattcatgcagctaaggggatgcatcgagtatccggcgctttcgtaatggaaaagggcgatgagcgttacatttttgccgactgtgccatcaacattaatcctgatgaagaaactttagctgaaattggctatcaatctgctctgactgccaagatggccgaaattgatcctaaggtcgcatttttgagcttttcaactaagggttcagccgaaggaccaatggttgataaggtacatgatgcagcagctatgttccaaaaggatcatccagaaattccagctgatggtgaattgcaatttgatgccgcttttgtacctgcagttagtgaaaagaaggctccaaactcaaaggtagctggacatgcgaatgtctttgttttcccagaattacaatcaggcaatatcggttataagatggttcaaagattaggtggcttcactgctgttggtccaattttgcaaggtttagcagctccagtgaatgacctatctcgaggctgcagtgaacaagatatttatgatttagcaattgttactgccgcacaagctttagcaaaggatgaaaagtaatgacaaagttagaaattaattctgctgatggaatgcagaaattaggtgcatccctagccaaaacggcccagccctacgatttattactattaaatggtgatttgggtgcaggcaagacaaccatgactcaaggattagggcgagcattaggcatacatcggcctgttaagagtcctacattcaccattgtgcgtgaatatcgagaagctaagttgccgctctttcatatggacttttatcgtttggaaaatgatgatttatcctcgattgatttggagggctatttagcagaaccaggtttagtggtaattgaatggccacaactagtaatgaatgatttgccagatgagtatttgcaacttacgattaccagagtggacgatagttgggattcaactaaacgggttgttgaatttactcctcatggtaagcgcaatgaagaatgggtcaaagctgcgttaactgaatttaataagtaaagcaaaaatctctaggatcaaaattcctagagatttttcatatctgataaaccaaatttttgattgcttcatcaccaaattgctcttcttgcttgattaaaatcccagcacatgcttcactatcacttaatgcgttatggtggtgccacaattcaacgtttaaggcctcagaaactgtgtctaatttgtggtcaggcagttctggttcgagtaatttactgctagctaaagtgtcaatgaccaaatagtggggctcctcaataccgtaacgtgccaggctttgccgcatgacattagtatcaaagcgagcgttatgtgcggctacaagcattcctggttgatacaattctttaatgtggggccagacctctgccattgttggagcgtttttaacgtcctcagctgtaatttgatgtacttgaatatttcgcgcgtcaaatggcatttgaggattaattactgtataaaagcgatcaacaattttattatttctcaccattaccaaagcaagtgaacaggcactttctggataatggttggctgtttcaaagtccattgcaataaaattcataaaattctccttttaaaaaagtatatcattaatattaatgaagctaacgcctttatgcggtaaaataaaacaagaaactttaaggaggcaacagcgtggaattacttgatttgaaagaaaaagggattgatattaaagagcaaatcccattaagcagatatacttttactaagacaggtggaccagctgaatatttggcctttcctaagacgactgatgaagtagaacaattagtaaaagtcacacgtgaaaatgaaattccattaacaattattggcaatgcctcaaatttaatcatccgtgacggcggaattgatgggttagtaattattttgactgaattaaaagagattaaagtagaagataatcaagttacagctgatgctggtgcacggattatcgatacagcttttgcggctgctcatcatggtttgagcggaatggaatttgctgctggaattcctggtagtattggcggtggtatttttatgaatgctggtgcctatggcggtgagatgcaagaagtagtgcaaagcgttaatgttttaaccagagcaggagaatttaaaacatattcaaacgcagaaatgaacttttcttaccggcattcattagttcaagaaaatggcgatattgtattaagcgccacttttgcactcaagtcaggcgataagttagagatcttagatcatatgcattatttaaatgctttacgtcgttataagcagccacttgaatatccatcttgtggcagtgtctttaagcggcctactgggcactttgttggtccgatgattattaaagctggtttacaaggtaaacaaatcggtggcgctcaagattcaatgaaacatgcaggttttatcgtgaataaaggcggtgctactgcaacagattatttgaatttaattcatttgatccaaaaggtaattaaagaaaagtttgacattgacttacgcacagaagttaggattatcggcaaagaaaagtaaaatattttagcaaagacaagctacaggctggaaggcttgcagctgttttttatgtgagggatggaaatggatattatcaaactaaaacacatcaccaaaaaatatgatgatgggtttgtagcattaaaagatataaatttaactattgaatctggtaaattttattcactacttggtcctagtggctcgggaaaatcgacaattttgcgaattattgctggctttactcagccatctagtggtcaagtcctctttgatggtaatgatattactgaccttgatgcttcaaaaagacatatcaatacagtttttcaaaattatgctttgtttccacacctggatgtttttcaaaatgtggcgtttggcttgaaaattaagaaaagaccaatgagtgaaatcaagccagctgttaaagatgctttgcatatggttcgtctagacggttacgctaaccgcgaaatttcggaacttagtggaggacagcagcagcgtgtagctattgcccgggcaattgttaatgaacctaaggttttactattagatgagtcgctatctgctttggataaacgtttacgaaaagacatgcaatttgaattacgggcaattcagaaaaagctaggcattacctttatttttgttacgcacgatcaagaagaagctctatcaatgagtgatgaaatttttgttttaaatgatgggcagattcaacaaagtggtaatccggtagcaatttacgatgagccagtgaatgactttgtagcacgttttattggtgactccaatattttatctggtcgaatgattcatgattacgaagtggaatttgctaataataaatttaaatgtgccgatggtgggatgaagcctaatgaaaaggttgaagtagttattcgtcccgaagacttggatattgttaaaccagaagatgggaagattgtggttacagcacagacgcaattatttttaggtgatcactttgagattaaggcaattgatgccaatgaaaatgaatggctgatccattctactaatggagttaaattgggacaacgtgttgggctcttttttgatccagaagatattcacgtcatgcggttaaatgaaagccaacacgattttgatgctcgactagaaaagtatgaggcggatgaaaatgaaaaataaaaagatgttttttatgattccatatctgctgtggattattctctttgtcattttgccgattttattgattctctggtattcgtttactgatagtaataacgcattcacgctcagaaattacgttgaattttttaaaaatggtacctttttaaaaatgatgcttaactcattttggtatgcatttttgatcaccttgttgacgttggtaatttcgtatccggcagcgtattttttaattaaaatgaaaaaccagcagctgtggctgttattgatcattttgccaacatggattaatttgctgcttaaagcatatgcatttattggcattttaggtaatgacggtttagtaaataaatttttacatttatttggtattggtcccgtaaatattttgtttactgattttgcttttatttttgtggcgacttacattgaaattccgtttatgattttgccaatttttaatgcgattaaagagattaatcctgcagtcattcatgcctctgaggatttgggtgctagtaaatggcaaacttttcgctatgttttatggccgctttctcgtccaggagttgaaagcggcgttcaggccatctttatcccatcattgtcattatttatgttaacaaggctgatcggcggcaatcgggtaatcacattagggactgctatcgaagagtattttatgaccacaatgaactggaatatgggggccacaattggagtaattttaatcgcgctgatggtggtagtcatgttgattactagcaaaaaggctagaagaaagaaggtagatttatgagaaacagacatttaatcgctaagatctatcttgcttttactttgatcctattatatgtacccattttttatttgatttacttttcattttctagtggtaaaaacatgaataaatttgagcactttacatgggctcattatcagactttatttcaagataatcgcttattagcgatatttttggaaactatcctactagcgctgttgtccagtttaatagcaacaattattgggacatttggtgcaattgcaattgctgcgatgaaaaaagaatctaataagaaaacaaccttagcattaaacaatgtcttgatggtgtcacctgatgtaattattggtgctagttttttgatcttttttacagcattgggaattggcttaaattttggttctgtattgttaagtcatattgccttttctattccgattgtggttttgatggtcttgccgcgacttaatgaaatggatatgtcgcttattgatgcagcacgtgatttaggggcgaattcatggcaggtttttagtgatgttttaattccagttattatgccaggcatcttttccggtttatttatggcgttgacctattcactagatgattttgccgtaacttttttcgttactgggaatggtttttcaactctttcagttgaaatttattctcgggcacgacaaggaatcgatcttgagattaatgctttaagtaccgtaatgttcatttttgtcttgttgcttgtaggaatctattattttattactactaaaaagggcagaaagaaaaatcatcgtgtgatgggaggcctagttaaatgaaaaagattatgatggcaattgcagctattttaattgcctgtgcaggcctttggggtttatcccatcatttggagaaatcgtctaccgggaaaaataaacaaaacttgattatctataactggggcgactatctagatccaaagttaataaaaaagtttgaaaagcagacaggttatcatgttgtctatgagacctttgattccaatgaagcgatgtataccaaaatcaaacaaggcggaacggcatatgatttgaccattccttctgagtatatggtaactaaaatgcgcaaggctcatttgcttgatcagttggatcaaaagcaaattcctaatttgaaatatattggcaagagttttttacataagtcatttgatcaaaataatgattattctgtgccatatttctgggggacactaggaattgtttataatgataaattcgtcaagccaggggcaattaagacttggaatgacctgtggagtaaaaagtatcgcaggcaaattttactagttgattcagctagggatgcaatggggatggcattggtttctttaggatattcaatgaataccacatctagtattaaactacatttggcacaaactaagcttaatagtctgggacccaatattaaggcgattatttcagatgaaatgaagatgtacctagtgcaaaatgaggcagcaattggcgttacctggtctggtgaggcttatgaaatgatggaacaaaatcctcacttgcattatgttgtgcctaagcaaggatcaaatttgtggtttgataattttgttattcctaaaactgtacaaaataaaaaagctgcacttaagtttattaattttatgcttgaacctaaaaatgcagcgcaaaatgcggaatatgttggatatgcaaccccaaataccgcagcccaaaaattattgccgaaaaaagttagagatgaccggcagttttatcctactcaaagtacgttgaagaatctacaggtctttagagatttaggtcctaagaagacccaagaatataatgacctatttttagaatttaaaatgtatgcacggtaaattggggcggttataattaaagaagaaaggagcaatcaatgcattttaatatttctaatctgtttacttggaataatttctccattgctttagatattttaatcatttggtatttagtttaccgtttgatcatgatgattcgtggtaccaaagcagtacaactggcaaaagggatcgtctttatctttattgttagaattattgccggcttactgcaactgcatgcggtaacttatattgtggaccaaattgtttcttgggcagtaatcggaattatcgttattttccagccggaaattcgtcgtggactagagcggctaggacgcacgccgatttttaatggccgaggtgagagtgctcatacacagtcggttaagatggtgcaggagctcgataaagcgattcaatacatgtctaaaagaagaattggtgccttaatcacgattcaacaagatacggggctagatgattatattgaaactggaatcaagctggatgcggatatttctggtgaattattaattaatatttttatccctaatacgccgttgcacgatggtgcggtaattatcaataataatcgaattgctgttgcagcagcatatttaccactgtcagataacagcatgattcctaagcgtttaggcacgcgtcacagagctgccgttggtatttctgaagttaccgatgcggtaacgatcgtcgtctcagaggaaactggtggcgtaactattactagaaacgggcgctttttagtagatttgtctcgtgaagaatatttgaagtatttgaatgctcaacttgttcctaaggaagagaagaaggttccatggattcgtcgtgtgattaataaagtctggaaatggggtgcagatcgatgaaagacttttgggataaacgctgggtaatcagaataatctcattgctgtttgcgatcttattagtggtttacattgactctactcaaacaggttttgttacacagggtgaatctaagaagacacggcaaactgctaatgaaacgcagacaattagtgttcctctgcaagtttcggttaatacagataaatactatgttgttggttatcctgaaaaggttaagataactttggagggttcgaatgcgttggttacttcgactgttaatactcaaagcttccgtgcttatattgatctaactcataagaaaataggtaagcaaaccgtaaaggtagaagttacgggactaaatagtcaattatcttacacgattaacccggcaacagttaatgttgatattgaacggcgaaaatctcgtaccatgcccgttcaaatagagtataataaaaatgctgttgctaatggatataatattggtacggctagtgttgatccgcagcaagttgaggttactggtgctagaagcgaagtaaatcagattgatcagatcgttgccaagttgcctttacctaatggcattaatcatgattatgagcgtcaagttattttgatagctgaagataaaaaagggcgtcaattaaatgcagtgattaatccatctacagtaaaagctagtttgccaatatcgcttttcaaaaagaaagttaagctaaatttaaagcctaaaaatgaaaaaaataataaagtctattcggttactgccaagaatgatgaggtaacactgtatggacaaaaggaaacattagcaaagattaagcagttggatgttgatgtagatctgaaaggaatctcatattcaactgtaaagaattaccctttagttttacctaagggagttgctcgcgttgatcctgaaaatgtacagatatcaattaaagtaaagaatgcgaataattaatttgagaaaggttgtttattaaatgttaaaatatttcggaactgatggtgttcgtggcgtagctaatcaaggcttaactccagaaatggcttttaaattaggtcgtgatggtggttatgttttaactaagaacaaaaaagacggcgaacaagctaaggtattagtatctcgtgatactcgtatttcaggccaaatgcttgaatatgccttgatttcaggccttctttcagttgggattgaagtgcttgaggttggcgtaattactactccaggtctttcatacttagtacgagcacaaggcgccgatgcaggggtgcaaatttcagcttcacacaaccctgtagaagataatgggattaagttctttggtagcgatggtttgaagctttcagatgaaatggaaggcgaaattgaaaaattaattgacgctaaggaagataaattacctcgtccatctgctaagggattaggtactgtaactgacttccacgaaggttcagctaaatacttgcaatttattgaaaatactattccagaagacttgggtggaattaaggtagttattgatggagctaacggtgcttcaagcgcattgatctcaagactgtttgctgattgtggcgttgactttactactattgcaactcacccagatggtttgaacattaacgatcatgttggtgcaacgcatactgaaaagttacaagaagaagttgttaagcaaggtgctcaacttggtttagcctttgatggggatgctgaccgttgcattgctgttgatgaaaatggtaatgaagttgatggtgaccacatcatgtacgtactcggctcatacttggcagaacatggtcgtttgaagaaagataccattgttactactgtaatgagtaatcttggttttactaaggctcttgaaaaagaaggcttgaagaatgttcgtacccaagttggtgaccgttacgtttctgaagaaatgcgtgctcacggctacaatctaggtggcgaacaatcaggtcacgttattatgagtgattatcataatactggtgatggtatgttaaccggtttgcatttaatgctcgtaatgaagaagactggtaagtcattaagtgaacttttgaaagactttaaagattacccacaatgcctagttaatgttccggttgctgacaagaagagctggaaagaacaccaaccaattcttgatgaaattgctgcagtggaaaaggatatggctggaaatggtcgtgtacttgttcgtccatcaggtactcaagacttgcttagagtaatggctgaaggaccaactcaagaagaaactgatgcctatgtagaccgtatcgttaaagtggtcgaaaaggaaatgggtaagtaaaatcctaattgaataatcgataagtaaaaagtcgtgagttaaatcacggctttttgtataattaatgctagatgtaatttttaagatccgagggattaaaatggctattaaattgatcgcggttgatttagatggaactttattatcaagcaataatactattttgccagaaacgcaaagaatgttgcgtgtcgcagtacaaaatgggattaaggttgttttagctactggacgaccattatcaggagtattgaactttgctaagcaattaggaattgaaggtgatgatcaatatgcaatcgtctttaatggtgcagtaattcaaacaatttctggtcgtgttttaatgagtcaggaattgaattatcaagacttcaataatatgttgcgttttcagcgtttaagtcatgtaaatgtacattttgagacgactaagtatttcattacaactgatcgggatttatctgtgcaaatgcaaattaatgcggctttgaccgataatattatgaaagttagagaccgaaaagaaattccaaaagattttacttttaacaaagtcggttttacttcaactgaaggagctgaccaggtagaaaaactgtggaatagtttccccgactgggcttttcagacttatgacattgttcgcagttttgacagtattattgaattaaatgccttgggagcttcaaaaggtaatgctttaatggatttggcttcacggctaaaaattgcccaaaaagacgtgatgatttttggtgatcaaggcaatgatctttcgatgttttctaatcccaacttcatgaaagtagcgatgggtaacgccattagtgagatcaaagataaggctgattatgttactgatgataatgatcacaacgggattgcaaaggctttgaaaaaatttgttctttagtaaaaaatttggatttagaagtgatgttttatggcagaaactaaagacgatcgtaattccattacccaatcagaatgggaagttatgcgtattatttggaccttaggagaagttcgtactggccaagtaatcaaagaactacaaggtaaaaaggattggtccgattccacaattaaaacgctaatgcggcgtttagtgcaaaagggcttgctaaagacgcgtaaagaaggccggtgttttgtttataagccgactattagtcagcgcaaaatgatgtctgaagttactttacatatgatgcaaaacatgtgtgatatgcacaagggtgaggtattaattcagttgctaaaagaagcaccgctttctaagggcgatattaagacgatgcagcaagaacttaaattgaaagaaaaggatgctcctgacatggtgccttgcaattgtttgccatctgaaaaaagtagatgttaggggaagatttttagatgaagaacatcgtcaaaataatactacgtttgataatggtcggcctagccgcagtatctttttggttattaatgactagcaatgtgaatttaaaaataaacgatacacaggcgatgggcaaagaagtaatcaatcgagtagtggatgactcagataatcctaatttgaaggcaggggttgagttactcgaagcatctggtttggaaaagacattgttagaacaattgccgccgaaatatcaagttaacttatcatatgctgatctatatagattgtgtgaaaaatataatgatcagggaaaattgaccactaaagatttaggcttaactagtaaaagtaagttggaagaaattatcaatgaatatttagtcaagcaaattaatcataaattgaaggaagattcagaagatgtgaaccatattattacaatttatgagtattcaatttttgcagtggctttgttatttttgttagccgcaattttgattttatttggtcgctcttcggcgtcaattccactagcactagctactattgcttcatttgtggcattgtggcttgcctcaaatgaggcgatgaccgcattgcaaagtcgagtttatagtggcattcttgtaactttgtcgcaggagatttgggttggcttaacagttggagttattacggcgattatttggccggttataaatagactaactaagaggaagaaaaggtaatgaaaaaaattctgtttgtttgtcatggcaatatttgccgctcaccaatggcagaggccgtgatgcaatatttgttaaaagaaaataacctagcagatcaatatactgctgaatctaaagcaactacgcaggatgctttaggtcatgggattgatgctcgtgcacaacgggaattagttgcaaaacatattccatatgatcgtggtcatcgtgctagtcaaatgactcgctcagactatgataattatgaatatttaatctgcatggatgaagaaaatttcgcagatatgaatcgcattactggtggagacccagagcataaagaacataaaattttagagtttgctggctcttatgctgatgtcgatgatccttggtatacaaatgattttgaaacagcgtataatgaaatttatcgtggctgtgaaggcttaattaagaaattaacgaaataaaataagatgggcatcgagctcatcttatttttgtgcgattaaacgaacaatattttcagttgtacgggtaacatttattggtccatcttttagggcttgctcaatatcttctgctttagcaagaatgccaaatatagcggtaaatccttcatcatagagttgatcaataccttgatctaaatagcctgctaaagaaataacaggaatgtgatattttttagcaattttagcaacaccaaagggtgttttaccaaacttagtttgaaaatcagttccgccttcgccggtaaaaacatagtcagcgtctttgatcttggcttcaagcttagtttcttgggcaattaattgcacgcctggatgaatactggcgttagtaaaggcgatcaggccagcgcctaggccgccagcagcaccactaccagaaatttgggcgacgtttttatcaatagtctgctcaattacttgtgcatagtgagataaattttgatctagaattttaacagttgtatcatctgcgcctttttgtgggccgaagacgctacttgcaccattaggtccagttagaggattggttacgtcactggctaataaaaattgggtatctttaatacgaggattaattgaagaaagatcaatattgacaatttgatctaaagcaccgcctgctagcttttgggtgatttcatgatgattttgatcaaaaaatttaacaccaagtgcttgtgccataccagcaccgccatcatttgtgctgcttccgcccaggccgatgataatctttttaacgtggtgcttcaaagctgcgttaattaattcgccggttccataagttgtagtctttaaaattgtttcgggagttcgtttactttttgcaacataagagagaccactagcttgtgccatttcgatgattgcagtttgtccatcacctgagatgccataataagctgatactttttgattaagcggaccggtaacatttatttggtatttttgcccgcctgtagcgtcaaccaatgaatcagttgtaccttcgccgccatcagccattggtactgcggttatttgtgcattgggaataactttttgaataccatttttcattgcaatgcagacttcttttgctgtcatgctttctttaaatgaatcaggtgcaagaacgaatttcattttaattacctcgctttttagttcattgtaaaatattttgcattttttcacaaaattatattgacaccgcttacaatgttggctattataataactgtaagtgagcggattactgatacgatcaggtcttagctattacaaataatgttgcgttggtatatcattatttgtgatagctttttctttttttgctaaggtggtgaattattatgaaatttcttaaaacatttaataatagtgctgccttaattgaaaataaccaaggtcaagaagaaatagtcctaggcaagggcgtaggatttggtctaaaaaaaagtgatcctgttgatgaaagcaaaattgaacgtcgcttcgttactaaagacgaagtggatcaagttaagggctttgaccctaaaacaattgaagtaactaataaggtacttcagctggtcgaacctctgcttcagattaagttcaatgactttcagtatcttgctttagcagatcacattgattttgcagttacgcgaattaaagatcatattgatatagctcccgctaacaatagttgggaagttcaaaatctttttccaaaagaatttgcggcagctaaaaaagtggtcaatctaattaatcaggagatgcagattaaattgccgcagagtgagtcggttttgatgacctatcacctggttaatgctaagagtgatgtttctcaagtacaagaaacaattcagattacaaatttgattcgtgggataatcgatattattcaattgcaatattcaatgcaacttgatacgagctcctttaactatagtaggtttgtttcgcatttgcgcattttgttagttagatttttacgaaataagcaaaaggaggaggcttcacttgatcctgcaatgctaggttttatgaaaatcaaatatagcaaagcgtatgagacggcggagcggatcaccacttacttacatgcaaaaatgggatgggatttagattcagatgatgaattttatcttgttttacatatttggcgcgtaactagtcgtcaagataattaaatatctaagttacttaggtatgttactaagaagattaggcatgaacccgagttactgaaagacgttgaacatttatgttctttagtttttgagtagcttgggtttttattttaaggaggaaaggcaaatggctaagaactatgatgaattagccaagaccatcattcaaaatgttggtggcaaagataatgtgaccagtgttgttcactgtgcaactcgtttgcgttttaaattaaaggatgaaaaaaaggctaacgatgatgttttaaaagatacagatggtgttgtaactgttgttaaagctggtggtcagtatcaagtggtcattggtaatgaagttgctgatgtttacgatgctgttgtcaaagaaggcggctttaatggcggtggacaagttcctgatgatgacgttgaagataattctagctttgtggataaagccgttgctttgatttcaggcatttttacagatattctagctccacttagtgctggcggtattattaaaggcctagtagttttagtaggcgcaatgggatggctttctactaaatcgggtacttaccaaattctatatgcaattggtgatagtattttctacttcttaccagtattcttaggggtaactgcagcacgtagatttcacatgaatcaatttatcggattagcaattggtgcaaccttaacttatccaactatggttcaattagctgcaagtaagactgttctaggtacattgtttaaaggaacggcttttgcctcagagattcacacgactttctttggcattccggttatcacgatgaattatacttctacagttttaccagtattatttaccgtttggtttgcttcaattattgagcactgggctaaaaagtggattccatcagttgtgcaaatgttcttggttccagttgtcactatgattattgctttaccagttgcatttatagtaattggtcctgtaatgacttgggttggggacgcaattggtgcagtgatgtcaggtgtttacaactttagtccaattattgctggtttattaatgggtgctctttggcaagtacttgttattttcggtgttcactggggaatcgttgccgtaactactgcagatttagccgcattaggttatgacccaattctaggtttatcctgcatggtttgttatgcgcaaattggtgttgttttagctattatccgtcaaactaaggacaaaaaacttaaagaaacagctactggtgcatttttctcaggactgttcggtgttactgaaccagcaatttatggtattacattaccaagaaaaacgccatttgttttaagctgtattgctggtgcagtctcaggtgcaatcattggtgcctttcattcagtattgtacattatgccatcaatgggattctttgcaattccggcctacattaatcctaagggaggatcaatgacaacaattgtcggcgtaattattgccggtattgtagcatttatagctggttttgcacttcaaatgctctttggtaaaaaatcagttgatgctgaatataataaaaaacaagcacaaaaagttgctgacgccgctaatgaagcagctaatattactaagagtgctcctgtacaagcaattttaagtgaagaaaaggaaaatccttcaaccaaattagtttcaccattagacggtgaagtaaaaccattgtcagaaattaaagatgaagtattctcaagcggtgcaatgggggaaggcgttgctattgaaccaagcgaaggtgtgcttcatgccccagctgatggtaagattgctttagttttcccaacaggacacgctgtcggacttaacactacagatggcgcagaagtgttaatgcacattggaatggataccgttaatctgcaaggtaagggcttcaagactttagtagaaaaaggtcaagaggttaaagcaggtgatccattggttaaatttaatattaaagaaattaaggctgctggctatgaagtgactactccagttgttgttacgaattctaagaaatatgaatctgtacagcaagtagctcaaggtgaagttaaagttggtcaagaaattttgtctttgcaaggcagtaacgcagaagttaaaacaactggtcaagttcaaaccaattagtctataattaatgtaaatgctttcagaaaaggagaatcataatgtcatttccaaagaactttttatggggcggagcaactgccgctaaccaaatcgaaggtgcatatgatgaagatggtaaaggcctatcagtaacagatattactactgcaggtagcttagatgcacctagaatgttgacttacaagttaaatggtaagttagaaaaaacaccaggagttccaggtgcgggacttcctgaaggggcagttggtgcaattgatcctaatgaatattatcctaaccatgtagcgattgatttttatcaccattacaaagatgatattaagatgtttgcggacatgggtttcaaaaccttccgtttatcaattgcttggactcggatcttccctaagggtgatgaggaaaagccaaatcaagctggacttgacttttatcgcagagtatttgaagaatgtaaaaaatatgatattgaacctttagttactatttctcactatgaagatccactttacctcagtgaaaaatatcatgactggcaagatcgtaaaatgatcgatatgtatgtgaaatatgctaagactttgtttgaagaatacaagggattagttaagtactggcttacttttaacgaaatcaattcaaccctgttgatgcttagtgcttttggcaataatgtgactgatgataaggcataccaacatgcatatcagaaattgcactatcaattcgtagctagtgctcgggcagttaagttggctcatgaaattgatcctgattatgtggtagggaatatgatttgtggaatcgttgattacccattaaccccagatccaaaggatattttgactaaccgccatatgtgggaacaaaatattttctactgtggggatgcacaatgcaagggtaagtatccaacatttgctaagcgtctttggaaagaacacaatgttcacttagacattactgagcaagataagaaggatatgttggaaggtaaagttgatatgtacaccttttcttactacatgagcaacgttatcacaactcatgaagtaaaagataaggttggcggtaacttcgccgctggtgctaagaatccataccttaagtattcagaatggggttgggcaactgatccagatggcttgcaatactaccttgaagttatgtatgaccgttacgaaatcccaatgatggtagttgaaaatggtctaggtgccgttgataagattagtgatgatggtaagattcatgacgattaccgcattgattaccttagaatgcacattaaggcaatgaatcgtgcgatcgaagatggcgttgatgtccgtgcctacactacttggggctgtattgatgaagtatcagctggtaccggtcaaatgtctaagcgttacggttttatctatgttgatcgtgatgatgaaggtaaaggtactcttaagagaatgcctaaggattcattttactggtacaagaaggtaattgaatctcacggtgaagatttagattaataacaaaaaatgatggcgtaagccatcattttttgtataggcaatattttacttaaaatgtcaatataccatataaaattcaaaagtgtataattaattctatattattttatataggagttgacattttgaatagaaaacgcaaaaaagtatggtggataatagggatagtcgccacagttttaatcgttttaattggagcagttgaagcatatttctttaatgttgcttttgttccaggtgaaaagacagtgctgaataaatattctagcaagaaaaagaaagattcacttgcgcagaataaaaagtggtataaaaacgctaaaaaagagcattggtatattaagtctgcttcttcaaactaccgcttagatgcaaattatattccaaataagcattctgaaaagactgctgtgttgctgcatggatttggtaataataaaaataccatggcaccctatgcggcgatgtttcatcaattgggatataatgttttgattcctgatgcgcgtgctcatggacaaagtcaagggaagtatattggctatggttggcctgaaaaatatgacgttagaaaatgggtcaataaagatttatcaattgaaggaagaaaacaacagattgtaatttttggcgtcagtatgggcggagcaacaacaatgatgactagtggcctcaagatgcctaagcaagttaaggcatatattgaagactgtgggtatagtgatgtgaaagctgaattcatgcatgaagcaaaagatttatacggtatgccgcaagcagtagctacaagtgcagttacgctattaagcggtgtaagtaaagcaaatcttggcttttatttaggggatgcatctgcagttaagcaattaaaaaagaatactaagccaatgctatttatccatggtggaaaagataattttgtgccaactaaaatggtgtatcaaaactatcatgctacaaatggtcctaaggagttatggattgccaaaagtgcagctcatgcgcgttcattcgaaacttatccgcatgaatataaaatgcgaataaacaaatttttaaataaatacatgtaaaaaaagacagaattaagcaatcaattctgtctttttgtaattacttcttaaatccataaaccgttggtaagtcttctagttttactccctgttgccagtaataaccttgctggaaaatatgtttattaccagcaaatttttgagcaatttccttatttctgatagcttctacaactagatctaagtgtttttccttagcaaagctagcccaagcatcaataaatttaatagtagtatcagaactaataggatcgaagtctagtaatgataatttgatcccactgattatatcagaatggtgatctacaaaagtaaagctatgaccaccagaatcaacatcgtctaaaacaacgtccaagccaatatcatggaatctttggaaagatttatcaaattgtttattacctaaggttccagcttgaagttgacgttcagttacttcaatgaccacttttttaccatacttactataaatattttcaataaatttccaaacgcttgggtatgcgaattgaataggctcaatgtttaaattgatacagatatcagggtacttagcaaaagcttgatctattgactctttttcggctaaaatccatttttgattttcttcttcagttccaattactctgaagaaatcgttatttgggaaggaatcattttcatctcgtaataacatttcataatgtgaaattgttacatttaaatctttatcgacttgataaataggttgaaaaacgttataccacttactcattactattacctctgttacctaattgaaatctgataagttctcattggtgattcacttacagatatttcatctaaactacaattcaatttatttaattcttcgccgaaacgattgaatagataatcggttaaattttctaaagtaggatttactttggtgaatggctcaacttcatttaaaaattgattattaaacttttttataatttcagcaatcttattttcaatttcattgaaacgaatcaatttgccgttattaatatgaaagctataccttatttcataagtatgggaatgagcctgcccgattcctttactccaacgaatagcatgtgatgcgttcaaataagttgtgaatatataagtatgatatttagtcgtcataattttttcttttcaataattgtcttatatctttttttatgatttggttaacctgttgaccttcttgaattatattaattccttgccaagttgtagtggtggttgaagcattaataatcccaacacaacgaatgaaagaacaaagtaaattataaaaaagcagtaaaaaaatcatccaaatatttttaagataaaattttctttcttctggaaagcttcctaagtatatgtaaacacaaattgaactcgaaatctccaaaaataaatataaaagataaattaccgcataagaaaacaataatgatatccatgaatagccaaatcctaataatataaaaatagcaaacatccaaattatttttaggaaagtgactgtgtgatcaatgattaaacgacgaatttgaaaattactgaagaattgtttccaagataaaacttgcgataaatatttgttaatgacttctagttcaccgcgttgccagcgttgtcgctgagtatatagttcactgaagccgctaattggttcagaataaaaaattgcatcatcacaaaatgaaatcgttccctttaaattgtaccggatttggaaagtcatgtcagtatcttcactaattgtatcggtactgtaaagatacgttctaattaaggtctcgcgtttaaaagccgaaaaggcaccagaaagcgtgaaaatatgattgctgttattttcaatatttcttcctgctagaaaggtttggcaatattcaaaatattcatttaaaattgttccagttaaagcatcgatatttggattagccgagaattttttaacaatgttgtttaaagcatgtttatccaaccgaccgtcactatcgatattaatgatatattgggatcttgctttataaatggcagcatttaatgcagaagactttccatgaggagaagtaagccaccgcatcaataattgtggatagtccgtttgagctttagcaaagacttgaaaggtgtcatctttgctgccattatcgacaacgaaaattcctagtaaatttttgggataatctgaatcagctagcgatttaaggcatctataaagtgttttggatgaattataagtcggaataataattgataatactggcaaaaaatctggcagaggggtttttttgcgaattttatgatgatgaagaagccgaataaaattaattatcatcggaatttcttcaaatatgacaggaattaaaagccaagtagcccagaatcccatttgtaatactgtttgatcaaacatgattattcctttttaatctaatttgcttcgccctagtaagtttgagactaattgtgaatgagtgaagacttgataatatagaagaattgtaaagatatagaaaaagatacgtcctataacgtcgtgaacccagaacagggttcgcaaattaaggtaatgaacggttatcccaattaaacctaatcggcaaatattaataaagtagatccaaaaaacaccgataatgctaagagcaaccttttgacgacgagtgtaaataggaaagaaaattaataagcttaaatatgccaatgtttcaataattccagaacattcatagtcaactaatagggtaattgatccaaaagtagtttgaatgtctaaagcagctggaaacggataagcagtaaagctatgagtcagctgtccaatcacaccagctccgcggctcactaggctagctaggaaccagacaaaatatttgtggcatgcaaaagtagttaaaagaaaagcaccaatagcaccaacccaataataaaaagcaaataaatgtgcacgattagttactgaaagggcatataaccaaactataatcccgccaattaaatatccattaagcattattcatttccttagttttttaatcagtcaatatttttccgcggccattattttttactttgtaaactaaatcatctgcgcgttcaagagtgttataaaaatgttcattagataaatgcttcgtgaagccacatgaaaacgagaactttattttagttttattatcaggaagtttgataaaattatcgcggaaatattgttcaacattgtttagtgcagcgatgatttgttcaggattagcattaaaaatgacaattgaaaattcgtcaccgccaaagcggtaaacgaaacaattaggagcaaaagctttatcaatctcgtgtttcagttttttagaaaaagtatgcagaacaatattaccatttaagtgaccataggtatcattgattactttaaaatgatcgatatcaatagcgccaatataggtattagttatattaggtcttttagataaatttttcatttcttggtcaaaagcgcgaaagttaagaagaccagttaattcatcacgcttgctttcgtaatgcaatttagcaattgcttcttcatgtcgactttcaaaataataacgccagctttcaccaatgatggtgaaagtagttccgattgtcaaagcgattaaaaatgtgaggtgtaattcattttctatataaagacgtacaaaatggatgagactccctgaataaagggcaatgatatacttaacttgatatgaaagattttgacaatgatttagaataaagcagattaatgcgatggatgaaatctgcaataaagtagcggggatatttataaatgaatatctctttaaatcaagaccaataagtaacggaattagtggtgtgataaaaagcaaaaaccaccaaatatgttgcttgttgcgtaataccataattgttggaatgacatacatataagcaattgctttaaaggtaaagatggttacatttgcaatacaaacagtttggagtatgtaaaaagtagtaaaacacaatatgataaataaatggtgacgccagtcttctagctgtttctcccatactttttctatttgtgtttgagttacaaccatgctaattgtaatgattggtaaagagatagtagggtaaattaaactaagattcatatttaaaaacctcttttcggtagaattgctgtcaaaattttatctaaattatatttagcagtgtctgctgaaagtgctgttaaaatcaagataataggtaagaattgaactagataacgactacgtccgccttcaaaaagaagtaagaatataaaaccgccaactagtgccattcttagcgtttgaataataaagccgcctttttgaaaactgaatagcaatacaaaaataataattgtccaaagaatttgagcgataaatctaaactcaataacatattttccatttggatagataaattccgctaagaatcctcgccagccttctgatggctgcttggaaataataaaatggccttcatgcagccagccgaatgtaccatctgcagtatttagaccttgctttttaactagaaattgtaaataacccaatggaccgcgttttttaagacgcttgatgatcatctttttagaatagacaactttttgtttcttagtaggaagctcatccatttttaaagctgcttttggatcataggcaccatcatgtgttaaaccaacgttgatgaagtggatcatcggaatttggcgtttttgattaacgatgatgtaatgctgatcttgaaccgcttttttaagaggttgataggctaaaacaaaacttgctgcaatagttaaacagaaaatagaagttagaattactttgttgttttttaaaatatagagtaaactcgttaaaatcgcggcaataccccaaacagcaactgaaggcttgatccaaacgccacatgctaagctaattccggataaaattgctcctaaaaaacgaatgacaactagatatgatttttgggtagcgatgctccagccaaaaattgaaagtgaaatagggagcaagcaccatacatctgtgtaaggaaccatgcaaatagggaatatgctaagcagactagctagaatataaatgatattgggaattttttgaaaattgattatcgcaattgtagcgatgattactaaaacacttaaatctgtaacaagtgttgaacataaagccattgttaaccaactggttgaatgaaagatattggcaacttgtcttagagtaaggaggatggataggttgttgtagttaacactgaaatatcctcttaattcaggtagattcggattgattatggtattgtgaacagcactaacatcaaatccgattgcgggatgtacgaagtagacaaattgaatttgccaaattaatgcaaggactaaacaaataatagaagtaatccatttatgcttgataaaaattgtttttaagaacatttgaaactttggaaaggagaaccagcttaaaactaaaattaatagtagtgcaaacattatgtaagttaagccggtcgtagtttttgcatctggcagccaattagtagatgagagcacagcgaagaagctaattataatcaagccaaagaaaaaggcacggatgacaccatttccaaaatgaaatatttttggggatattttactgatgttcatgacgtactaactttcttttatggtaataactaattgcggctattgaagctaagacaaaagcgatgatggcagggatgtatgggccggtgctggctccgctgattgtgatttttgtgttgccacccaaattaggattttgcattgtcattttagttgatccgtttaggtcatctctgttaaacatattgtaaggaatcttaattatggccgattggcggccatcactatctgcataataatgacagagattatctttagttgctttatattgattagtttgaggatcccatactccaattcctgcatatccagattttccattttgaatattccatggattgacatctaaattaacactgtatgtagcattaccaacatttatattgtaggctgatggctgcaattgacgatatccaccttcatatccatgactatttctattggttttagaatcagggcaaatgtctacatataacaacaattgattatttttaggatcattaataaatcctatttgatggtatgtaaattgatctgttgtccagtcctcagtaggatagccattttctttccattctgaagcgggactccatgatgcatacactttgctattaaaggatatacaaaaagctaagcattccaaggctagcagaaatactataatcttctttcttatatttttcattttattcagtctcagtttaaataattctataaatatatgccttatctccattatactttagtataacacttagtgctaaccttgttgagtatataaaattacaaaataattgtaaattactatatgattatagaatatagagtgaaagtgatatcaatttgagcaaaaaagaagctcgtaaagcatgccataattaatgacattatttgcgagcttttttgtaatttagtttttatatggttgcttgttggggttttcttcgtccaacaatccaagtaatgattaatgcagcgatagcttcaactataatcattgtgattcttgctggaatcttggtactaccaagccatacgtcaagaataatagaaccgataatgataattcccatccaaatccattgagatttgtcaaaagcaataccgtattcttcttcacgacgtctaattccaggtaaaattgcacccaaaccaattaagacaattacggctacaatattaatgatcaattcgtaccaccaaaggccactgccttgcttaacatcttgtggtgcaaaaccaaggatggttgctacggcagtaacaactaacaaggcaagaccaacaagccaagcaagtttatcgtttttaatgtagacatattttgatgggtacttctttgagttctttcttactctcatgaatgagtagaagatccagcaggtaacacctggtgaaatgattgagttcaagttaagcaaccagttgaagatatcgttcatgtcaggtaagaagatacctaagatcatgatgaatgatgaaagggcaacagttaagatgtaaccgttaattggtaagccgtttttgtccttcttacgtaagaacttaggcatgtacttatcgccagtgtcggagataagcattctagtcatggcatcaagcaatacggcaaccaaggcacagttgaacaataatgatgtccaagcccagaggtaaagcaagaatttacccataccgaattgtttaccaaccatgtcgaatacgtagtaagcaccgttcatcttcaagtcgtttggaatgtggtatgcgtcaaagtagataccaagtgcaaatgaaccaaggatagttaagaaagcagtcatgatagctaaagtaatcattgccttagggaagtctgacttaggtttcttcatcttagttacatatggtgcaaccagttcacacccattcatggcatagattaacattccgacggttgaccagtagtgcaagtcgaatttaggaatgattgtgtgccaagtaaatggttgggtagccatgtgaccgcctgattttgccaaaccaacaaaggcaaggaaaacaaacaagacagtcataatgaccatcaaaccaccaccaatactggaaaggaattccattgagttggcaaagtggtgttcaacgataatgaaaacaatgaacacaacgaaagtcaaagcagcaaacatggtagtaggaattttatcttggaatccctttgaaccggtcaatgcccaacctaggtcgacaatgatttcgttagcggagtctacagcataaggaattgaggctgcccagtatgtccaagcagtgaagtaacctaaaaattctccgtcagtaccgcggacccatgatgaaagtccgccaccttcttcactaaacgtagaacctaattgtcctaccattaatgagtaaggtgttacataaagcaaacacatgataatccaagaggtgataactggcatcccttggttttggaagttgtacatgatatcgtccaagccgataacagtacaaagtgccatcaaggtcaaaacaggccaagtgatggctttcattttatttgttgatgttaaatcgtccaattaattctcatccttctctatttaaaaataattactccctaaaaagataagaatcctggcgacttatttttacatttttcgttcattctattcctttcttagatgaaagtattcaaataaattttacctattaaaaagaactgtgactgatacaatcccactaaagtggacgatttaaatacataaagtattcaattatccatggaggtgggattttttatgtccagaaaaagtaaatattcattcgatcaaaagatatgggcagttgaacaatacttgaatggtaataggagcagcgttgaaatagctaaacggcttaagatgccaagtaaaagtggagcgatgcaagtaagaagatgggttcatcaatatcaaagcaatcgtgatacccttctaagtaatgctcaatacaataatcattactctaaggcatttaaagaaaaggttgttcaagaatatttagctggcaaaatgtcgttaccttctttagctaataaatatggcattagaagcaatggaacagtatcagaatgggtttccaagtataatagtcatatagaaaatcgggactatgatccccatccggaggtctatatgactaaagcaagaagaaaaactacccagcaagaaagaattcagattgttcaatactgtcttaatcacgacaagaattacactcaaacagctgtcaaatttgattgttcttaccagcaggtttacagctggacacacaaatatctagctaatggtgaaacaggattaacagataaacgaggcagacataagaagccagaagagctaactgagttagaactggctaatcgaaaaattaaggaattagagcgtcagctcaaagaagaacaaactaagaacgaattcctaaaaaaattagatcagttagaaaggatgtgcttgccggacaaccaagatacagacaagccgcaataaaaagacgctggaaacaagaaacatatcagttaatccatgactgccatcaaaagtacaattggaagattgatttaatgtgcaaatgggctaaaatagcacgctcagcttattacaaatactttgatcctaagcgcaagccgagtaagcgtgaagaacgagacaaaaagattgaagcaaagatcattgaaataactaagtctaacaacagtctgtttgggacggaaaagatgaccatggcagttaatcgacagatgtctgatgaaaagccggtttatcataaaactgtttaccgcttgatgtgtatcaatggcattagatcacaaaagcctagataccagaagctaaagttcaagcatacaacgcctgagaaaacggccgaaaacaagttaaaaagagactttaatgcatctagacctaatgaaaaatggtgtacagatatcactgaagtcgttgctgctaacctgcctaaggcatatctatgtactgtgtttgatctatatgatcgctatcctgttggctacgcaattagtaaacgaaacgatactgctttagttcaagcagcctataagcaggctgttaaagcataccctaatgctcatccgcttttccatagtgatcgtggttttcaatttactcgcgcacctttccaaaaccaattagaagaccaaggcatgacgcaatcaatgtctcgtgttggctgctgtattgataatggtccaatggaaggctggcaaggcattatcaaagaaatgcgagttattcttcatcctcaagtggccagttatgatgaacttaatgattctatttgtaagacaatagattactacattaatgaagatccacagaaacgttttaacggtttaactgctggtgaaatgcgcaaagaagcgatgaaaggcaatattaagaattgccctattgcaccaaatcatcgaattgagaaatactggcaaaaaatacacgaaaagaaaataagagaagccaaaaaatcctcagctgattattaatcaactgaggaataaaagctttatgtaattctactgtctacttgacagggaatgtatcagactagtgtaaaacgctttctatttacaatcaaatctctttacttattataggtaagcatgtataatacaccaacaaaaagtaagagtcaaaaagaaaggtggggatgttaatgactggacaagtattggcaattggaattattattttggcgttgggactattaactagcaaaagaaagccagcgcctcaaagaataaatagacgcagataagaggtatttatggcaaaaacatcacaaattattcgtaacaaaaaagaaacaaaattttcaactagacaatacacgcgctgtgaacgttgcggccgaccgcattcagtttatcggaagtttggcttatgccgagaatgtatgcgtgaattagctcataagggtcaacttccaggtgttaagaaggctagctggtagaaaggaaaaacaatgaaagtttttgtagctggtgctacaggcagagtgagcaaagaagtaatcaaaagattgatagatgaaggctatgaagtaattgcaggtgcaagaagagaaaatactgttgaaattatttctcctaatatgcgggtgcaacatttggattttcatgattcgcttaataagctgaccgaagaattaggtcacccagatgcagtgatttttgtagcaggttctcgtggaaaggacttattgcaaactgacttaaatggcgcagttaagctgatgaaggctgctgaagctaatggcgttaagcgttacgttcaactaagctccgcctttgcgcttgaccaagacaagtgggcagaaattccttctcttgcaagcattattgattatgatattgctaagtacttttctgatgaatggttaattcataatactaatttggattatacgatcattcaaccaggtaacttaatggagaagccagcaacgggtaagacatcatttactccagaaggtggagaaaattcgattgatgatgttgctcaggtattggttgatagcctaaagtatgataatacgattcatcaagtaattattatgcatgatggggacacaccaattgatgaagcattaagcaaagttaaataatttataaaacgggtcaagtttaacccgttttttgttaaagtaagaagtaaaaaagagagaagaaatagcaatggataaatttcattttactaaacgagaaaaaatctttttactgcttgctttattggtgctagttgcattgttcatttctagttcaatgacttatcaacagcaggaaattcatgacaataaaattaaccgttattttggctggttagagaatatcgttgctggctgggattttacttacggtggtcgtattcacaatgtgcaagttgatggtcgagcagggctggcccaatttgttttacgtaaaatggctcactttggttcttattttttactaggtggttttggctatttaggattaagaagaattttcaaaatcaaatgggtagcaccagttttaacttggtttatggcaattgcatttgctgtatttgatgaatatcatcaatttttaacaggtgatagaacaccgagcgtgcatgatgtaatgcttgatggagcaggagcattaacggcaattttgctgataatgctagtattgtttattaaacacagattttttgaccagaaaaaacaagtttaaatggttgacaccattgaattttgaggtgctgtgagttaagataatatcgttaattaatattagaaaaaagaaagaaggatccttatgtcaggacattcaaaatggcacaatattcaaggccgcaagaatgcgcaagacgcaaagagaggtaaaattttccaaaagttatctcgtgaaatttatatggctgcaaagagtggtggtcctgatcctgatgggaatcctacattacgtatggtaattgataaggcacgttcaaacaacatgcctaaggataacatcaagcgtgccatcaagaaggccgaaggtggttcagaagaacactacgacgaaattacttacgaaggttatgctccaggtggtgttgcagtctttgttgaagctttgactgataacaagaaccgtacagcttcggacgttcgtgttgctttcactcgtaacggtggttcacttggtgctactggttcagttgcttacatgtttgaccgtaaaggctacattgtaattgatcgttcaactactgatgctgatgaagatcaagtattacttgatgttatggatgctggtggtgacgatcttcaaactagtgatgatgcatacgaaatctacactgatccaaagcaatttgcaggtgtacgtgacgccttaattaaggatggttacaaactagcagatgctgaattaactatgattccacaaaacaccactccagttccagcagataagaaggaacaatttgaacatttagttgatgctcttgaagatagtgacgatgttcaaaatgtttatactgcagcggctgatgaagattaattagttaatgatgaaatagcttagccaatggctaagctattttttttgtgtactttttaatggttttttaatcttgaaatgctgttagatcaacgttttttagagttgagaaaattttttgtgtttttttaaatttctcacaaaaaaatcgattttttttgcgtaataaataatgtgaggcaaaaaaggaggatttttatgaagatcaaagaaattgtcagtgaattattgattgaggcaattaaagttaaagcaagtgatattttctttttcccgaaaaaagaaaacttgatggttaaatttcggaccggtaagggtctaattgaatatgcaggttttactttggagacgggaaaggaaattatcaatttttttaagtacagtgctcagatggatattgcagaacatcgtcgcccgcaggttggcgcaatgacatatgagaatgaaggacatgaatatttcttgcgtttatctagcttaggagatttttccgatcaagagtcactggttattcgagtcatctatgggattgaccatagtcaatattttattccagagcagctgggaacaattgaaaagctggctaagagtcgcggattgattattactagtggtccaactggctcgggcaagacaacgacaatgtatgaaattgctaagaaaatgagccaaaacaaagtagtgatgacaatcgaggatcctgttgaaattcatgagtcttcttttttgcaagcacaagtcaataacgaagcgggaattgattaccaaaacctgttaaaggcggcattacggcatcgtccagatattttaattattggagaaattcgtgatcaaggaacagcacgtttagcagttgatgcagctttaagtggacacctggtttttgcgacagttcatgctaaaagtactttgcaaactatttctcgactagagggattaggtattaggtgtgacgaactgacaaattgtctaactgcagtgtcgtatcagcgattattagtcagtcaaggaaaattaaagtgcttgatggatattgcagcagattctttgctaaaaaaagagctaggcaaatcggttcgtggtgaattcgttaattggcaggaaaatctagagcgtttgtggaaaggaggagaaattaatcatgaagtatattggcaattccaaaaaggataagttaaatggcgaagaacaattggcctttttggattatttaaaacatagtttagataatggtttttctttgctcaattcaattgaattaatgccggcattgtggccaaaaaggtgtcagttgatggaaagaatggctagtcgcatgaaagaaggagcaagttttagtactgaactgcttaaactaggcttttctaaaacgacagtaactcaggttaatttggctttacagcaaggaaacctagttgaatgtttgcagcatttagcaacgttgaatcgactaaaacaggagcagatgaaaaaactgcgggctgaattatcttatccgttggttttagcgataatgatggtgattttactggtctttatgcaatcgtttatttcgacacaattcagcgatagcagtgatcattcaggagatatggtcatgattggtctgatcattattgtattgctgggcttatatttttttgctaagatcgttactttgctcaataaacaggattattcatcaatgaaaaaactgagtaaatatccgttaattgggcaggtagttatgctgtatattcattatttgttggtttatgacattggactgctgctagctagtggcttttcattgcagcgaatgtgcgaatatgcggcagatcaagagaaaggttcattgcagcaagcactgggacaaaagatagggcacgatttagctgaaggaaaaaatttagaagaaattattaatgcagaggattttttgcctaatagtttattagttttattgcagactggctctgagcgaaagagcttgagtaagcgctgtttgttattaggacgtagcctatttttggatttaactgaaaaaattgagaaattagtcgtcaatgttcaaccagcttgttttattttaattggcttatgcattattggaatgtatttgaagctgttattaccaatgtattcaatgatgcaaggactatagaaaaagtgacattaaagataaaagtaaaaaaatagagtgaagaagaggattaagttaaaaatgaaagagaagatgaagaagtatttagcaaacattatggctaagcgccgcaagcaagagggttttactttgattgaaatggttgtggtaattgccattatcgtgattttgattttgctaattgtgcctaatttgattaatcaaaagaagaatgctgaaactaaaactgcggatgcatttaggactactgtgcaaacgcaagttgagttatataaggataaatatggtgaacctaaagattttgaagatctaaaaaaggacgattacttaactggtgatcaaattactaaagctaaaaagaatttcacgttagatagtggcgaagtcgttgaaaagaaataaattagccggcttttccctactagaagtaataattacacttggtgtttgctgtggcattttgttgattggtagtttgcagttaaaaagatatcaagaaaaactgatttttgataatactgttaaaagagttacgacggcacttgatcaaacttcgaggtacagtacgatcaaggaggttactatttgcgtatcatatctagctaaatccaatcaaattttattctctggcggaaaatatcacaaaagtattccagttgatcaaaatatcaaaattactggcttggatcattttaaattcaacctgactggttattctaaaccaggtacggtgacttttagtggctacggaatggaaaaaagcctgaaatatcaaatgctgtgggggagagtagcggaatgataaaagttaaaggatttctagtaattgagagctttatagcaattataattgctgtgattgctgttagttgcttttatataactgtagctgaaaatcagaaaaatggtcgtgagatggaattaaaaacagatcgtgcttatgcttaccatatactgactaaaactgacctggagcaagtaacagttcacgatcgaatttatcaaaaggcaggacgtaatcatgtttgggatgcaacgactaaacaaacttttgcggtcaaagagtaaaggttttatgttagctgaagcaatgttttcgctttttattactatgatggtgctgctaattttacaaaatttattgttgagtgttaaaaaagcaaacttgaatcaaaatcagcatgtcaatgaagtagcctatgcttatgtacagctagaaaattttatgcgggctgacaaaattaaggcagtgtatccagtaactaaattagctataagtaatagtgcttcctttaagtgcatcgatcaaaaaggcgatgcaactacttaccgaattgaatactataaaaagaacgtacttaaagtatctggtgcagggaaaggctatatgccgttattatttaacgttgaaaaggctgcttttaaaaccactaaagatagcatcattattagggtaacagagaaaaataagggtgcatcagatttagtttttcagcttgatgaggaacaggaaaagaaaaatgctaaaaccaaagaaaaagacgcataacgtaaaaggcagtgccttactaagtagtgtattagttttaatgaccacgcttttgtttatcaaaatgtatcaagatatttatcatgctagcatggagaacaatcgcctaattatcgaatgcttaacggatgattgactttccttgcacctctttatccctttctataaaataattaaggtatggagggaccgctatggaaaatttggaaaaactttttaatcagtttttagactgtgtgcaaactttgcaaacggcattaaatgtttcatttacagaagccttagtagagacttttgataacttagaaagtggcaagattaaggttgaaaatggtgcaccggatgaaaaaacagtggctgaattaagtcaaaagtatcaagcaatagattatgacgaaattagccaaaaagaaaaggctcaagtctttacttttctaactttaaaggcagttaatgatgatggctttgatgttaaccaaatgcctactccacctgcaattgctacagtagtagcaatgttgatgcataaattattaaaagatcaaaagatggaaatcgttgatcctgccgtgggtacagggaatttgttgttttcaattatttctcaacttaaggcactcaatcattctaaggataattatcaattggtagggattgataacgatgaagatatgttaagtttgacagatgtggctgcgcatctgaataatattgacattgagttatatcatcaagacgctttaatgccttggatgtgtcctaacgctgatgcaattgtaagtgatttacctgtaggctattatccagttgatgagaatgccaagaattttgaaaatcaggctaagaaaggtcattcttttgctcatttgttgttaatcgaacaaattattaataatttaaagcctaacggctatgcctttttggtagttcctaagtctattttgtcaggcaagattggcgctgattttatgccatggttaactaagaaagtctatttgaaggcgattgtagagttgccagatgatatgtttaagaacaagtttaatccaaagtcagttttagttttccaaaatcacggtgatgaggccaaagcaagtgaagttttgcttaccaaacttggttccttgaaaaaagaagatactttaattcaatttaatgttaaacttaacgagtggtatgcaaagattaatcattaattgataaagcacttatttttttgaaagaagaggaattaatttttatgaaaaaagttttggcaattaactctggtagttcatcttttaagtacaaattattctcattaccagatgaaaaggttcttgccaaaggaatggctgatcgtgtaggtcttgaagattcatcatttgagattaagttagctgatggtactaagcacgttgaaaaaactgaaatcccagatcaagaagctgcagttagcttattgatcaagtttttaaaaggataccatgttgttgaagaactaactgaaattgtcggtgtaggacatcgtgttgttaatggtggagagtactttaaggattctactattattactaaggaaaatctgcctaagatctacgaattgtcagattatgctccgcttcacaatcctgctgaggctcgcggaattgaagcttttatgaatgttttaccaaatgtgccagaagttgcggtttttgatactacttatcaccgtaatcttgatccagtacattatttgtattcacttccttatgaatattatgaaaaatatggtgtacgtaaatatggtgctcatggtacttcaattcgctatacagcaccgcgtgctgctaaattactaggtaaagatttaaaagacttaaagttagtcatctgtcacttgggatcaggcgcatcaattactgcagttaaggatggcaagtcttacgatacctcaatgggctttagtccaattgccggaattacaatggctactagaaccggtgatatcgatccttcactcgtgcaacatctaatgaaggtagagcataagtcgatggatgaaatgatttatatcatgaataataagtctggtttgttgggcttgtcaggaatttcaccagatatgcgcgatgtgcgtgaaagtgatagcgaacgggctaagttagcaagaaaaattttcattaatcgtattattcgctacgttggtgcttatattgccgaaatgggcggcgttgatgcaattatctttactgctggtattggtgaacatgatactggtgtgagaaaagcggttcttgacgctttcgcatatatgggtgttgttgtagataatgaagctaatgaaagtgttagtgaaggactaatcacaaaaacagattccaaagttgcaggaatggttatcccaactaatgaagaattgatgattgaacgtgatgtggtacgtttgactaatattgattaagcatttttatcgcatgtaatgtgtgtctatgctataatgaataagtatctcaaggggatgttttgggattcgacaggcgtagacccgcattgactgcggttcgtaggttacgactacgtaaaaacgttacagttaaatataactgcaaataacaaaaattcttacgcattagctgcttaatttaagcgcatgtgttgctccttgtcggtttactcgtggctgacaccgagtatcaactttagcgagttacgtttaactacctcacctgaatagttaaaaagagtcttaacaggttagctagcccattctagccctgttatatggcgttttgagctagtgaagttcaagtaatataactatgatcgtagaggtcagtgacgagatgcgtttggacaggggttcaattcccctcatctccatagataaccgttctagatgttgttctagagcggttttttgttttgctaaatcgtttatctgctatgcatttttgttatgcattatcactaaaaataagtattaaacattgcatgaaagaaatcatataatgaatactgtcctaaaattaatgattattaaattaacaaaaaggtggaaacaattatggaatacaaaaataaatattttgcaggtgaaagaattctttatggattaactgatgcaatccttgatggtattacatttggcagtggtgaatctcccttaaaagaagctaaaaatatcagattaaagaattcaatttttaaatggaaatatccactttggtatgatgaaaatgtgaaagttgaaaataccacgtttgaaactatgtcacggtctggaatttggtataccaagaatatttcaattaaaaatagtgctttacaggcacctaaattattcagaaggacaagtcatattattttagataatgttcattttgctaacgcagaagaaacaatgtggacttgtaatgatattaagattaccaattctcaaattaatggtgattattttggtaaagatagccagaatatttatcttgatcacgtttccgttgtgggaaattatgtttttgatggtgcagaaaacattgaagttcataattcaacttttatctctaaagatgctttttggaattgcaataatgtcactatttacgattcaattattgatggtgaatatttagcttggaatactaacaacattacgttaattaattgtaaaattgaaagtgatcagggcttgaactacattgatcagcttgagattaagaatggttccttgattcatacagatttagcttttgaatatgtttctaatttagatgtggagcttaatacaaagattgatagtattaaaaacccaatttctggtaaaattacggtacctgagattggtactttgattatcgatccagataaggtagatccatctaaaaccgagcttgattgtccgaaaataggtacaaaaattgttcattctgatacgaaccaaacaccaaaggattagtgagatatatgcaatatgattttgaaaatgcaccagataggtcaaagactgattcagtaaagtgggatgtgaagtctgatgaattaccaatgtggattgccgatatggactttaagacggcacctgaaattatcgaggcaatgcaacaaaaattgacattaggtgcatttggttatgagttcccacaagcagattattttaatgctgtcgctgattggtatgaaacagaacataatcatcggccacaaacaaattggatgatttttactactggagtagtccctgctatttcatcaattgtacgccgtatttcacatattggtgataatgttttagtacaagagccagtttataatattttttataattccattttgaataatgggcgccatgttttgtcgagtgatttagctttcgatggtaaaagttattcgatcaactgggcagacttggaacaaaaattagctgagccgctaacgactttgatgattttttgtaacccacataatccagtaggaaaagtttggactagtgaagaagtacaaaaaattgcggatctttgtcaccaataccatgtaacattactatcggatgagatccatggtgatttggttagacaaggtccagattacacgccagccttttctgtaacaggtgaagcacaaaatagtgtgatttcactagtgtccccaagcaaaacttttaatgttgctgctcttcattctgctacggcaattgttcctaatgaaaatttgcgcaatatggttaaccgcggtttaaatagtgatgaagtagccgagcctaatttattggcgattccagcaacgattgcggcttatgagcaaggccatgattggcttaatgctttgaaaaaacagttaaagcaaaattttgcgtatgtgcagaattttattgaaaaaaacattcctgaagtacaaatcatttcgggcaatgcgacatatttgatgtggatcgatgtgcaaaagatcagtactgattcacaggaattagcagagttcattcgccaagaaactgggctgattatttcagctggtagtgtttatcgtggaaatggccatgattttattcgaattaatctagcttgtcctttgacgatggtcaaggatgggatgcaaagattagctacaggtattcgtaagtataacaagtagctttacatgtaaaacaaatagtatacatatatctaagaaaagggtttcatttattctgccttaaagtttatactttaattgaggtgatttaaatggaaccattatttttaaccccatactttaggccaaaaatttggggtggacgtaaattagatgatatttttcactatgatattccagaaggaaaagttggagaagcttggattatttcaggttacaaggatgacgcgtcaactgtaacagatgggccacttaagggaatgtcattgcgggatgtttacttgaagcatccggaattgtttggcaaccctaaggccaaggaatttccattattggtaaaattcctagatgctaatgataatttatcagttcaagtacacccggatgatgattatgctcgcaaagtagaaaatgattctggtaagactgagtcttggtatgtaatgcaagctgatccaggtgcttatattatttatggtcatcatgcaaaaagccgtgaagaattagctgatatgatccacaaaggcgaatgggataagctgctcagaaaagttccggttaaagcaggcgatttcttctatgtgccagcaggtacaattcatgctttaactaagggatgcttagtaattgaaactcaacagtcaagtgatgtaacttaccgcttgtatgactacgatcgtgtgggcaaggatggtaaaaagcgtgagcttcatactcaaaagtcaattgatgtgaccactgttccccatgttgatcctaagttagatgttaagactagccaagatcaagatgcagaaattaagacattggttgaaccaccactttcaccacacttttatttgtggcaaattgaccttgatggtacttggaagaccggcttaaaggatcatccatacctgttagtttccgttatcaaaggcgaaggaaaattagaagctgatggcaagtcatatgatttgaagatgggaactaatttaattattccaaatgagatgaagaatttcactttcactggtaaaataagaatagttatgtctgcaccaggtgaggaataaccgtttaaatttatcagaattaggagtgagaaatcgtgatctatgtcgcttgtggcttagttatggtggcggtagggttgatttggctgattacgccagccaaaaggcccaaccgaatttatggctatttatcttatcttgcgcaagttaaccaggatagttttaagtttgctcagaaacgggcaagctggtattgtatcctgtttgggtttattcaagcactgttaggagtaatcattcactatttgaattgggatcgctattttctcatttggctgttaacattttatttatttatcttattgccaattgtttataccgaaaaaagtttgaaaacatttttgtctaaacgacatgaattgccacatgactatgtcgatcctgatcaagtgaagcataagagaacaaaaggatttagggattgataatgagtttgagaatattaatggtcgaagatgacacttccgtagctgaaatgatgggaatgtttttcaaaaaagaaggttggcaacaagacattgctgttgatggtgtcgaagccgtcgatatgtttaaaaagaacgcggataagtatgatctgattacgttagatttgaatttgccaaaaaaagatgggattcaagtagctaaagaggtacgggcaatttcgccgacagtgccaattattatgcttactgctcgtggcagtgaatcagatcaagtgttggggctaggtatcggagctgatgagtatgtcactaagccatttagcccaattgctttgattgcccgcattaaggctttgcatcgccgcgtgatgatggaagaagaaccagctcatactcaagaagataatcaagactatgagattacgaccgatcatttgaagatttcaaaaaatagacgagaagttttatttgataatcagccggtaatgggtttgacaccaaaagaatttgatttgctgtatacaatggcacaaaagcctaaacaagtcttttctcgtgaccaattactagaactagtttggggctatgagtattatggtgaagaaagaactgttgatgctcatattaaaaagcttcgacagaaattagagaaggttggtgccaaggtgatccaaactgtttggggcgtcggttacaagtttgatgattcgcaggtcaaataatgaaattaatttaccaaaatatgttgagtttcttactcattattgtgacaactatctcgattattggttactcagagattggttatgcgcgtaatcaagcttatacgcaaaactaccagcggatggaaagctatgctaattctttgggaaacttggcggaagctgatagccaaaatgggactgcattgcttagcaataacttcttgaatcaattagaatatgttcttcgtggtgatgatgctcatttacgtatttttaatgataaaaatgagcagatttatcccaaaacaaaggctagaattcagctttcacaagaagtttttactactttaaaaaatgggcaagagattagaattcaaaataatcataatgaaaattcaccgattagttcaactaaggatgcctacacgggggttttggttccatggatgaatggcaaaaatcttgttggcattgtttggataggatcgagagtaaagcatgttgagcgaccgattttaatggctaaacgcaatttgttgcgtgcattgttaattactgtagcggttggattgttgctgagctttattatttcttattattcaactaaacgaattaagcgattatcacgtgctacgcaaaaagttgcatcaggtaactttaatgtgcaaattgagcataaagatagcgatgaaattgatcaattggctgagaatttcaataaaatggtgcaggctttgaagcagtcgaacgaagaggttaaggctcaagaagagcgacgagaccaattcatggctgatgctgctcatgaaatgcggacgccattgacaacaattaatggcattctagagggcttgcaatacgatgctatcccagaggattctaaaccgaagtcaatcgcgttaatgcagcgcgaaactaaacgattaattcggttagtcaatgaaaatttggactatgaaaagattcgaaataatcaaattatgctggttaagactaactttaatgccacaattattctgcatgatttgaagtcgcaattaaaacaaaatgcaactaaagccaacgatgagctggttgtagaggcacctgatcagttgcctatttatgcagatcgtgaccgttttacccaggtaatggttaacttagttcaaaatgcgattcaattcactcatgatggcaaaattattatttcgggtaaacggatagagcatggaacacaattatcggttaaggataatggtattggcatgagcaagaatcagactaagtatatttttgaacgctttttcaaggctgatccatcgcgtgctcgaatgggaactggcgaatcaggcttgggacttgcgattgtttcttctttgattaagcaacatggtggcaaagtagaagtattttccgcaccaggtaaaggttccacattcaccgtgaccttttatgacaagggctatgaacagtttgtagctaaaaactaaaaaagaacgcacagtttttttgaaaggtctgtgcgttctttttagttattggtattttctgaactatttttgtttttcgtattctctttaatatttttaacgctgtcaggaacttgggtaatttcttgttttctatcttttagttcagcggcatcagtacggtaaagattagtagttgtaccgcgatgtctgctataaagcgaggtggaattgccagctaattcatttctgatagcgatcattttttgataattgacggaataatcaaattgggttggatcagcagggacaaagccagttggggtgtagaagcgtaacaaattgtggttgtttaataagtcagaatagtctaatgatgccttggccttttgtgctagctcagagatttcttttttctcttgaggagtaaaattaatgatttgtttaccgctaactcggtcataaacggtacctttgattcctttagcaccaactatgatatatctggagctgacaatggtcccattacgaaagacgatccaattttgtcttttaggcgaaagcatgtcgctaccgaattggacatagtttttattgttaataccgagcaaatgcatcagtgttggcaagacatcaatttcaccagcaatttcatgattaatttttcctttcaaattattggcatgaatcatgaatggaacacgctgcatttgaacattattgtaagtattccacgtgtcagagctttcaccaataattggtgctaaggtttcattttcagaattacttaacccatagtgatcaccataaatgactaccattgagtttttgtaaagaccagaagactttaagtagtggaaaaattcacgcaatgcctcatctaggtagtgggcagtttcaaagtaattgttgatagtttggtcggcagtgtttgtagtcttaaagttagggtccttgtcttctttatctaagttaaacggaatgtggttggttaccgtaatgaacttagcatagaaaggctgctgcatctgctctaaatatttaacgctttcggcaaaaagcagcttatcttttaacccatagccgcttgcatctttactttgggagctatagtaatttttatcaaagaaataattatagcccatatttttataaacatcatttcgattccaaaaactaccgacgttgccgtgaaagacagcggaagtatagccatcttgacgcaaaatttgcggtgcagcttgaaaggtgttttccgaacctaaagaagtgaataaagatccgtcgggaataccgtaagtactagtttctagcatgttttccgcgtcactggttctacctagaccaacttggtggtagaagttgttaaaactgagcgtatgtttattttgataaagtgaatttaggaacggcgtcacttctttgccattaaccttaagattaattaaaaattgctggaaactttctaagtggatgataatcacattgcgttttttctcaataccaaaatatgaggaagatggagcagcattttgttttttggtaaaagttaaaatctggttcaagtccgcagcgttggcatttttagtgacttgaacattttgcgcactcttgaagcaatcataagcagtaaaggtgtcaataccaaggtatttaacgacataggagcgatcaaaagtgttgcgcaataagcgcggacgagaggtttctgccaaaaaaatgttaagagttaggacaaatgcgcctactgaggtaatcgcaaatggggtggataagccgtaagatctttgatcaattttgattttatgaatgatcagtaaagtaacaataacgatcaaatcaatccagataataatatctgttggatgcagaagggcaacggtacttttacctagaccctgcgaaactttaccaacgttagacatcgttttaattgttaaaaagtccgaaaattgacgatagtagataatatttgcaaaaagcaatgccgtattggcaaagtctaaaattaacattgtgatgtaagagatcagcggtttaggaatataaaaaccgaagctgattaaaatgatggcggaccctacggggctgagccacataatgaaatgttgatacgggtcgctcaagcctaaattgaaatcaaaataagctgcaaaaatatatttcagccagaaacaaacaactaaaagggttaaaaagcccgttcgtgtttgaataaaactgataattttctttttttccatataatgctcctttaacatcttttaattttaatggttcacctcttttaaaacaataatttgctaagagttatcttttttttaagattttccagccgtgaaaataggtataatctataatgaatattttggaaagaggcaaagtatgctatttttgggcccactttatagttttttagctaaacagtatgcaactaatattaaccactttgcattagttaaattaaccttattagcgctggataaaacaatattttattttttaatttttgctgtattgcgcttaatttggcttcttttggtgcgccgcagaagatcaattaggtctgaagctagcgtttgggtcttttctttttacataatcttagttttgatgctgacaacttttagaaatacctactttccgtggcagcttgattttaatttctctaggccattgagtgatattaacttggtattcatgaaggaaacttggaaattagtctatgctcccagtcatttggatttcttttataattcttttggcaatgtcttgtgctttgtgccgtttggcatttttttccccattgttttttcaaaaagagcaacgtttttaaggacggtactgatggggatgctgttttcagtgggaattgagactctgcagtttttgctggtgacgggggttagcgatattgatgatgttttcttcaatacttgtggagcaattttgggttatgtgatttttaaaattgtcaaaaaagcctgaatgcgcttataatgtactggtatttataaatcaagattgttaaaataggtttgtgaaaaatattttatttagttaggaagcagatttatgagtttaattaaatttgatagtagtaaactaacacaatttgttcatgaaaatgaattaagcgaaatgcaagctatggttaacgctgctaatactgaacttcgcgatggaactggtgcaggtaacgatttccgtggttggcttaatttgccagttgactatgacaaggatgaatttgcccgcattaagaaggcagccaagaagattcaatcagattcagaagttttgatttgtattggtatcggtggttcttaccttggtgcccaagctgcaattgaattcttgaacagcaatttctatggcaaggaaaagaacggtatgccaactgttgtcttctgtggtaactcactttcaggctcatacctttatgacttgattgaatggttaggcgacaaggacttcagtgttaacgtaatttctaagtcaggtactactactgaaccatcagtagccttcagaatcttcaaggacaagttaatcaagaagtatggtaaggaagaagctgctaagagaatttatgcaactactgaccgtcaaaagggtgctttaaagactgaagctgatgcagaaggttacgaagaatttgtagttcctgatgatgttggtggtcgttacagtgttctttcagctgttggtttacttccaatcgctgcttcaggtgctgacattgacgaattgatgaagggtgctgcagacgcacgtgctgactacactgatactgatttgtcaaaggcaactccataccaatacgcagcacttcgtaacatcctttaccgtaagggttacactactgaaattgttgaaaactatgaaccaagtttaagaatgttcggtgaatggtgcaagcaattaatgggtgaatcagaaggtaaggatcaaaaaggtatttacccatcaagcgctaacttcactactgaccttcattcacttggtcaatacatccaagaaggtttacgtaatttatttgaaactgttatccgtgttgaaaatccacgtcatgatgttaagatcccaggcgatgaaaagaaccttgaccaacttaacttcttggaaggtaagagcttgaactacgtaaacgatcgtgcttatgaaggtgttgttttggctcacaccgatggtggtgttccagttatgactgttaacattccagaccaaagtgcacatactttaggttacatgatttacttcttcgaattagcaattgctatttcaggttacttgaacggtattaacccattcaaccaaccaggtgttgaagcttacaagcgtaacatgtttggtttacttaacaagccaggttacgaaaacttacacgacgacttagctaagcgtctttaatattagatatactcagcatatttgatagtatgcgtattaatataattagctgtgctaattaaagaaagagtaggaaacaaaggttttttgtgtgaaagagaatactaaaaatgttttagcagtattatcagctgcgtttatgtcatttgtcggaattttgacggaaactagtttaaacgtcacttttcctacgatgatgaagcaatttggtgtcggtttggatataattcaatagacgacaacaggatatttattggcgattgcgattattatgatttgttcttcatatttgaatgaacgttttactgcgcggcaattgtttattgttgcttgcgttggttttatgattggaagcgtaattagtgctgtagcacctaattttcctattttactgttaggtcggctgatttcagctctaggtgcaggattaagtacaccgttgatgtttaacttagtaaccgaagttatgcctcgcgaaaaatggggcgtttacatgggaatcgccggcttagtagtagctatggcaccgactttaggaccagcatttggcggtatcactactttttatcttaactggcgctggatttttggttttgttacaatttttgcgatcattgtttttgttgccgggctatttgtagtcggtaagtatcatgaacaaactaaaaatagttttgattggctatcatttatcgttttagctatagcatttattactttgacattaggcgtaaatcaaattagtaatggatttgctaatcctttaatgtggattttattaattgtgactgcaattttaatttggttatttgttagattatctaaaaaatcatccaagaaattgttagatctagccgtatttaagcaaaaagcgtttgtttatggtgcgttagcttactttttattgcaatttaataatattggtatcagttttgtattgcctaactacatccaaattgtcggaaagcaaacatctttagttggtggtttgattttgctaccaggtagtattattgcagggctactcaatccatattttggtagcctatatgataaaaaaggagctaaattgccactttatttaggtggcttcttaatggcgatcagctgcttgttatttgctatttttggcttaaatttgactgtgatgatgatcattattatttatggcatcatgatgttaggacacagaatgtcattttctaacacgctagctgaagctttgaaggtagaaaaaggagcatcgcgcgccgatgcaaccgcagtttgtcagactagccagcaattagccggttctgtaggaacaactatcttagcagcaattatgtcgatttggccgaaaaagggtgcagcgtcctatgcactggcgacagctcaaggtagtcaggcagccttttattttactttattaatggcattaatcattttaattagctactggaaaatgtttaaagcagaaaaataatatttgactagtacattagcgttaaaataagttataatactagacggatgatgaaatttagtgagagataaaaagacgactgacacacagccgtcttttttctataaattatattttggcgttttcgttgataaaactatggataattttttcgcgcatagctaagaaaacagtgttgtgtccagtcggatggactcgattggtcaataaaattagaccagagcgtttgatgcgatcaagaataattaaagtaccagtaaaacccgtgtgcaaaatgatcggataattttgctttggatcaaaccgaaggtcccatccccaagagcgtggttttatgccttggggatttttattatcaaatagctggctgacagtcttttgactataaggtaaaacatcctttagtcctaaataaccttgggcgaaggtaactaagtcttgaagattggaaaataagccagcagaaccgcaatctattccaagttgtctagctttaggatcatgtggaataccttgcaagacatggccatcaactagggcagtaggcacgcaatcatccttttgtggtgaaaaagtagtattttcaagcggcatttgattgaggacttgctctgtgactacttcttggacaggtttgccaaaaatctttttaataactaatccaagtaagataaagtttgtatcggcataccgcatcttgtgttcaaattcgtcagttactggcagattgataattgcttgtagtaaggcatcatgatctagtttgtcgcggtgggggatccagccacgaatgccactagtatgggttagcaagtgataaaggcgtacacgagggtctttaaattcaggaataaattgctgcaagggctcagtaaagttaagtttgccttggtcataaagcttaagcaagacattttctgttgctaaaaccttagtcaaactagctaggtcgtattctgcaaaagggctcagctgagtaacttctgggtagatactagcaaaaccagtagttgatgtaaaaatttgcttatttttgataaaagtgtaattgacgcctggaacaacgcgttcaaaaaccattgattcaattaaatgctgtgttttattaaagtcgatcatgtttcaccatccattagcattattatagtcaaaattacttgacaagcatagaagaaaaaagcataattataaatgttgattcgcccgttggtcaaatggttaagacgctaccctctcaaggtggagttatgagttcaattctcgtacgggtgatttactgggatatagccaaattggtaaggcacaggattctggttcctggatgtttgggttcgagccccaatatcccaataattagaaaggctgtagcattagagctacagcttttttgtacacaaaaaaggattcccgcgggaatcctttctatttacataccagccttaatgattttcttttcggccatcttctttctaagtgcaagcattgcagtataagttgaaagaatatagaccttcttagttggcagttttttaatttcttcaattaggctatcatcatctggattagtactcatttgtcctggatcaaagccagcaatttcaagtctaaagcccatatcatgccagcgttgaccaccgacgaggatctttttaatcttttctttgtctaatccttcaaaatcagcatcccaaatccaagaagtatcaattccatcagcgtggttggcattaagcaaggcaactagtgaataatcatctttttctgtattaagcatgtgcaagacttcatccaaaccaactgggtttttaactagaattaaatcgatatccttatcgccatagtgaattaattcttgacgaccaaagatccgtttattttctgcaaaagcttgagcaacttcagcttcagttaatccaaagtggcgtgcaacagaataggcggctaaggcattataaatgttataagtaccaccaatattaatggaatattgcttgttgcccatttggaacgttgagctattaggtgtttgatcaataatcttgttaactgtaaaagttaaatcaggacggtggtagccacagttaggacagaagaagtcgcctaagttggcataaatacgttcatgataatgtaaaatgtggtcgcattttggacaaagaacaccatcggtattgactggagccttgaagtcattttcaggtttgtcatcaggaagtttaaagccataaaaaattttcttattaggcaattcaactgatgaaaaaatgcttgcatctccgttagcgataattgtagcgtcaggtgctaatttaataccattaacgatcttgtcataagtggtatagatttcaccataacggtccatctgatcacggaaaatgttggttaatacaaagacgctaggatgaagtaatttggttaccattttaacatttgcttcatcaacttctagaacagcgatttttcttttaactctcttgtgcttgtgagccaaaaaagcggtcacgattccttgttgcatgttggaaccagatggattagttaacacatcaccatactttttctttaaagcttcaacaatcaaagcagtagtcattgtcttaccattagttcccgtgacaataacagtttcatagcctttggctaaagaatttaaaacttctggatcaattttcattgctaatttgcctggaaaactggtgccgcccttaagggcattatgcaaaaaccaatagcttgatttaccggcaactttagcaattcctgatttaaaactcatgtacatccctcactttaaaactatgtctaagtttagcatagagcgaggatgaaaacgaggtttaatacctacacaaatttattttttcctctatactattaaggcgaagactttttgttaaaagggagggccagcatggcgcaattattttttcgttatggtgcaatgagcagtggcaaaacaattgagatcttgaaagtagctcacaattatgaagcacaggggcgcaagattgccctaatgaccagtggcttggataatcgtagcggtgtaggaacggttgcttctagaattggacttcaccgagaagcaattccaattactgctgatatgaatctatttgattatattaaaaagatgaacaaagcagatgttgctgatggtgatggtaaactagcttgtgtgttaattgatgaggcacaatttttgaagagacatcatgtcttagaatgcgctaaaattgtagatgtgttcaatattccagtaatgacctttggcttaaaaaacgattttcaaaatcatctatttgaaggtagtgaaaatttattgatttttgctgataaaatagaagagatgaagaccatttgtcattattgtggacacaaggcaacaatgaatttaagaattaacaatggcaagcctgtttatgagggtgaacaagtacaaattggtggcgatgaaagttattatcctgtttgtcgctatcattactttcacccaggtgttgaaagatagagaggatttttagtttatggataaagttatggctcaattagagggtctagtagctcactatgaagaacttcaggaaatgatggccgatcctgaagttattaatgatactaagcgctacatggagatttctaaggaagaagccgatttgcgtgaagtagtacaaaaatataagaagtacaaagaggacaaaaaagagattgaagataataaagaaattatctccagtgaaactgatcctgatttaattgaaatggctaaggaagaaaattctgaaattgagaaagaaattcccgagcttgaagatcaaatcaagattttgatgttgcctaaggatcctaacgatgataaagatattatcatggaaatccgtggtgctgccggtggtgacgaagcttctttgtttgctggcgatttgcttagaatgtatgaaaaatatgctgaacgtcaaaactggaaggtttcaatgattgattcagaacctactgaggttggcggctataaacgtgtggcaatcatgattactggtgacaaggtttattcgaaattaaagtatgaaaatggtgcacaccgtgttcaacggattccagtaactgaatctcaaggacgtgttcatacttcaactgccactgttgctgttatgcctgaatatgagcaagtagacattgatattgatcctaaggatattcgtgttgatgtttaccgttcaagtggtgccggtggtcagcacattaacaagacctctagtgccgttagaatgactcacttgccaaccgggattgtagttgcaatgcaggatcaacgtagtcaacaacagaaccgtgaaaaggcaatgcaaattttgaaatcacgtgtttatgactattatgaaagtcaaaatcaagctcagtacgatgctaagagaaagaatgcagttggtactggtgatcgttccgaaagaattagaacatataactatccacaaaatcgtgtaacagatcaccgcatcggcttaaccattaacaagcttgatcgtgtgatgaacggtgaacttgatgaaattattgatgcattaattctttacaaccaaactaagcaattagaggagttggctgatcaaaatgcctaaaatgactttaaagcagatgcgtattaaagcgggtgagagtgctgaaaatgcgcgtcctgaggatgttgattatgttctagcagagcgcttaggcttgacaccaagtgaatttgaactgaagcaagaaatggacttaactgctgaccagattaagcaggccaataaagatatcgaaaaattggctaagggcatatctccacagtatattttgggttatgcttggtttttgggctataaaattatggtgcaacgcggtgtcttgattcctcgttttgaaactgaagaattggttgaatgggcattgcagacacttaaatcaggtgatcaagtccttgacttgggtaccggttctggctgtattaccgtggctttagctaaagaagcacagaaaaaaggcattacagatttaactttatatgctagtgatgtaacggatactgccttaagaacaagtgaggaaaactttttaacttatgatcttgatgtaactactcgtaaagccaacgtgctgttgggcttagaagaatttgataagatcatctctaatccgccgtatattaagacaagcgaaaagaatgtaatggatgaaaatgtcttgcaaaatgaacctaaagaagctctttttgctggcaaagatggtctagacttctataagaaatttgctaagcaagtgcgtgagcatttgaatagccatggagaatttttcttagaatttggttttagcgaagaagaacaactgaaggaattgtttgctaaagaattgcctgattttgaaatcgaatttagaaaagatatggccggcaagccacgcatggttcatggaaggtggcaaaaataagaatgatggaaacgaagatttttaaaaaagatcaaatcaatgatgcagttaagttgttagctaagggtgaattggttgcttttccaactgagacagtctatggtctaggtgcaattgcaaccaaagaaaagtctgtgaagggcgtttatgctgctaagggacgtccaagtgataacccattgatcgttactgtttctgacgaagaaatgatggctaagtatgctaaagaagttccagaaagagctaagaaattaattaaacatttctggccaggtcctttgacattgctattgtttgttaaaccaggaactctgccagatgcagttactgggggacttgatactgtagcatttcgttgtcctgatgatcaattgactcatgatttaattgctaaattgggttatccaattgtaggaccatcggctaatacctcaactaagcctagtcctactactgcagagcacgtttaccatgatttaaaagggaagattgccggaattattgatgatggccctactcgtgtgggattagaatcgacaattatcgacttatcggtagaaacaccaatcgttcttcgtcctggtgaaattactccagaagagttaagcgaagttttaggtgaaaaagttttaattaacacgggcaaagtgtcagacaaagatatacctaaggcaccaggaatgaaataccgtcattatgctccaagtgagccggtagtcgtggttgatgatcctgctgattttgcaaaaattgattttaatgaaaaaactggtgtagcagctttagcgccagtcttagctaaaattaatttacctcaagcaaataaatttgatctgggcaacaatttagttgatgccgaccataacttatttggtggcttgcgctatttcgatgatcaagatgatatcgaaactatttatgtacaaggatttcatgaaggtgaagaaagtttagcttacatgaatcgattgaataaagctgcaggtggacatcatttcaataaataaaaaataaaacgcaaagggctttaaaccctttgcgtttttgattaaaatatttaatgatcatattattttttataggaggcatatatgggaaagttcgtagttttggatcacccattgattcaacacaagttgactattattcgtcgcaaggatacggggtcaaatgaattccgtcgcattgttggtgaaattggtgggttaatgacctatgaaatcactagagatttgccacttgaagatgttgaaattgaaacaccaatgggtaagactgtccaaaaggaaattgctggtaagaagttgacaattgtgccaattttacgtgccggtatggggatgcttaatggtgtccttgaaatggttccttcagctaagattgccgttatcgggatgtaccgtgacgaaaagactttgaagccacatgaatatttcttcaaggctccaaaggatattgctgaacgtgaatgtttagtcgttgatccaatgcttgcaactggtggctcagctaatgatgccattgctgcattgaagaagcgtggtgttaaggaaattaagcttgctgttttggtagctgctccagaaggtattaaggcagttcaagaagcaaatcctgacgttgacatttatgcagctgctgaagatgacaaattgatggataatggttatattttcccaggtttgggtgatgctggtgacagactatttggtactaagtaatcgtcctttttagaaaaatattttctctaatgcgctttcattttacacaaagaccttttttggtgttaagatgatttacgtgttcgagttttattcagcacgagaagggaggtcacgaagtaatggagaaatcatttgtttttaaattcatgggcttgaattttgaactttctggtattatcggttcaacgctaatggttttagcagttttatttatctgcatttggctttcaagaaaagttgaaatgaaacccaataagagacaaaatgtgttcgagtatttacttgatttcactaacggcattgttaaagataacgttagcgacaaggatgctcaaaatcacctgtcattatatgcatttgttttattcctgtttatttggtttatgaaccaattagggatgttcatggaagtcaaagttgatgattggatgtttattaaatcaccaactgctgatccagtagcgacaatgtcgtttgcaatgatgaccttgcttctatcgttcacattcggcgtacaacgatttggtgttggcggatatttgaagagctatacgcaaccagttggttttatgcttccaattaatttaattgaagagtttaccaactttttaaccttatcattacgtctatatgggaatatttatgctggtgaagttttgctaactttaattggtaatgatctagcacatgctggtggaccatttacgttagttttggcagctccattagccatgatttggcaaggtttctctgtcttcattggctctatccaggcatatgtttttgtaactttatcaatggtttacattggtaagaaggttactacagaataaatttttggaggtataaatttatgtcagaagcttttaaatatcttgctgcatccattgcagctggtttagcagctttggctgcatcattgggtaacggtaaagttatttcaaagactcttgaaggtatggctcgtcaacctgaaagtgcaggtaacttgagagcaacaatgtttattggtgttggtttgatcgaagccgttcctattttggctatcgttgttgccttcttgattttgttcctttaataaaaagagataattttctgtttaaaggaatagtattaaagagagaagggcagtaaatgactattcaaacattatttgcagcctcacatatttacttaggtaatgctatctggtatttgatctgttttgccatcttgatgcttcttattaagcactttgcttggggaccagtatcagatatgatggaaaagcggcggcaaaaagttattgatgacttggattcagctgctagtgaacgaaagaaagctgaaacgcttgctaatgagcgtgaagctgccttgaagaactcaagacaagaagcaacacaaattctctctgacgctaagagtaacgcgcaaaacacaagtaaagaaatcgtagcaaatgcaaacgaagatgctgcagcaattcgcaaaaaggctaatgaagatgccgctcaggcaaaagcagacgctttgaattctgcacgcgatcaagttgctgatatttctgtagcaatcgctgaaaaagtaattgctaagaatttatctgctaaagaccaaaaagatttagtcgaccaatttattaaggggttggatgattaatggctttaagtagagaagaaattgcagcacgctacggtgccgcactatttggttatgcgcaagacaatgatgcattagacactgtttataatgaaatggtggaattaaaaaaggctgctgaagccaatccacaaatcattagtgtcttgagcgatcctattttaagtagtaaagataaaaaggatcttttgactgcaattgaaaaagatttttcagatgaggttcaaaactttttgaatttgttatttaaatatgatcgttttgctgatttgatcgatattattgatcgctttgtcttactttatgataatgaaaagaaggtcgcatctggcgttgcaactacggctgttaagctagatgatgatcaactcaagcgtttaggtgaaagttttgctaagaaatataacctaaacgtggtgcgtctagagaataaagttgatccaagtattttaggcggcgtggttcttcaagtagaagatcgcgtgattgatggatcagttaagaataaactgaagaagatccgtgcgcagataattgataaaaattaaaagaggtgaaaccattgagcattaaagcggaagaaattagttccttgatcaagcaacaacttgaacattacgacgataagctcgacatcagcgaagttggtgttgtaacttatgttggtgatggtatcgcccgtgctcacggacttaacgatgttttgtccggtgagttattgaagtttgataacggctcatacggtattgcacaaaaccttgaatcaaatgatgtaggtatcattattttgggtcaatttgacaatattcgtgaaggtgaccgtgttcaaagaactggacgaatcatggaagttcctgttggtgacgccttaatcggtagagtagttaacccattgggtcaaccagtggacggtttgggtgaaattaagactgacaagagtcgtccaattgaagccaaggctccgggggttatggatcgacaatcagttgatcaaccacttcaaactggtattaaggctatcgatgccttagttccaatcggtcgtggtcagcgtgaattgattatcggtgaccgtaagactggtaaaactagtttggccatcgacactatccttaaccaaaaggggcaagacgtaatttgtatttacgttgctgttggtcaaaaggaatcaaccgttagaactcaagtagaaactttaaagcgttttggcgcaatggattataccattgttgttgaagcgggcccaagtgagccagcaccaatgctttatattgcaccatatgctggtactgctatgggtgaggaatttatgtacaatggcagggatgtattaatcgtatttgacgacctatccaaacaagccgtcgcttaccgtgaactttccttgcttctccgtcgtccgcctggtcgtgaagcttatccaggtgatgttttctacttacactcacgtttgcttgaacgtagtgctaagttgaatgacaaacttggcggcggttcattaacagctttgccaattattcaaactgaagctggggatatttctgcatatattccaaccaacgtaatttcaattactgatggacagattttcttgcaaagcgatttgttctttgctggtactcgtccagccatcgatgctggtaactcagtttctcgtgttggtggtaacgcccagatcaaggcaatgaagaaggttgctggtactttgcgtactgaccttgcagcttaccgtgaacttgaaagtttcgctcaatttggtagtgatcttgatcaagctactcaagctaagttgaatagaggtcaaagaaccgttgaagtattgaaacaaccacttcatgatccaattcctgttgaaaagcaagttgtgattctttatgctttgactcacggatatcttgacgctgttccagttgaagatattgctcgtttccaaaacgaattatttgataactttgacagcagtcatgctgatttgctcaagacaattcgtgaaactagtcaattgccagatgataagaaattgtcagcagcaattgaagaattcagtgagagctttacaccaagtgagaaataggaggtagaatatgcctgcatctttacttgagttaaagaaaaaaattgcttcagtaaaacaaactggtaagattacagaagctatgagaatggtctctgcttcaaagttgaaccaaactgaaaatcgtgataaaggttataccgtttataacgaccatattcgtagaactatttctcgtttaattagctcagaagtagttgataatatacgtgaaaaagacgtctcaattgataagaacaatgttgctcaaattgattatactgatgtctttggtttggggattacggcagatatgattcagccacgtaagaatatcaagacaacaggtttcttggtaatttcaggtgaccgtggtcttgtaggttcttataacagcaatgtcattaagaatatgatgagtatctttgaggacgaacgtgctcaaggacacgatatcaaagttcttgctgtaggttcggttgcggcacaattctttaaaaagaacaatattaacgttgtttatgaaaagaatggtgtttcggatgtaccaacttttgatgaagccttaccaattgtttcaaccgcaattaagatgtttttgaatggtgtctatgaccagctttacgtatgttatactcaccacgttaactcattatcatctgcttttcgtgttgaaaaaatgttaccaatcgtcgatttagatattggtgtcaaagaagctgaagcacataaagaattagaatacgatattgaaccagatccaaatcaagtgttaatgaagttgttaccacaatatgcacgttctactatttacggtgctattttggatgctaagactgccgaacatgctagttcaatgacagccatgcagagtgcgactgataatgctaatgatctggtatcaaacttaactacaaaattaaatcgtgctagacaggcacaaattactactgaaattactgaaattatcagtggtgcaaatgccttagagtaataaagaaaaggaggtagatgttttgagtgaaggtgaaatcgttcaagtaatcggcccagttgtcgatgttaaattcccaattgataagaatttacctgatattaacaatgccttgcgtgtaattaagtcagaggatgaaagcattgtccttgaagttacacttgagcttggtgatggtgtcttaagaacgatcgccatggaatctaccgatggtcttcgtcgtggtatgaaagtcgaagatactggcggtccaatttccgttccagttggtgaagatactttaggacgcgtgtttaacgttttgggtcaaccaattgacggtggtccagaattttcaaaagatcaccctcgtgaaggtatccacaaggaagcacctaagtacgcagacttgactactagtcgtgaaattcttgaaactggtatcaaggttatcgacttgcttgagccatatgtacgtggtggtaaagttggtttgttcggtggtgccggtgttggtaagactactatcattcaggaattaattcacaacattgctcaagaacatggtggtatttccgtatttactggtgttggtgaaagaactcgtgaaggtaacgacctttacttcgaaatgaaagcttcaggcgttttaagtaaaacggccatggtatttggtcagatgaacgagccgcctggtgccagaatgcgtgttgcgttaactggtttgacacttgctgaatactttagagatgttgagggtcaagacgtgttgctctttatcgacaatatcttccggtttactcaggctggttcagaagtttcagctttgcttggtcgtatgccaagtgccgttggttatcagccaactttagcaacagaaatgggacaattgcaggaaagaattacttctactaagaagggttcaattacttcaattcaagccgtttatgttcctgccgatgactatactgacccagctccatcaaccacattcgcacacttggatgctactactaacttggaacgtagcttagtagaacaaggtatttatccagctgttgacccacttgaatcttcatcaagtgcccttgaccctgaagttgttggtgaagaacactatgaagtagctactcgagtacaacatgttttacaacgttaccatgaattacaggatattatttctgttttaggtatggatgaattgtctgatgaagaaaaattgatcgttgcacgtgcacgtaaggtccaattcttcttgtcacaaaacttctttgttgcagaacaatttactggtgtaccaggttcatatgttccaattaaggaaagcattaagggctttaagcttattttggatggtcatcttgatgacttaccagaagatgcctttcgtggtgtcggcccaattgaagatgttttgaaaaaagcacaagaaatgggtgtaactccaagtgatccagaagctaaagctttactagaaaagtagggtgatgtcaaatggcagatccagagaagctttttaaagtagatgttgtaactcctaatggaatgatttattcacatcgtggaagtatcgttgatgtacgtgccgttgatggtgaacgttcaatcatgtataaccacgtaccacttttaactccactagttattagtgaggttaagattaagcgaagccgtgaaatggattcagtagttgatcatattgcgatttcgggtggctatattgagttttcgaataatgttgctacgattattgcagatagtgctgaacgcgcaagaaacattgatgtttctcgtgctgaggcagcgaagcaacgcgctgagcaacgtttgaaggaagcacgggaaaaacatgacgaacaaactatggcacgtgctgaagttgctttaagacgagcaatgaacagaattagcgtgtacaacactaaaggtcactagaagaaggaagagacgaatgcacaaaatgctgcatccgtctttttttgtcaaaattgaggaaaatatatgtttcaattaggcgttcatgtcattattagtatcattatatatttgattgcgattggcttatcttttcaagcagttaaagcaattcaactagataaaattattcgtaaaggccatgtttttgaaacgcaattattatatttatttattgcaattggcttaggctttttagttggcaattttgtcattacttttatcgatacttcaatgcaattgagtaatttgttttaaagattgtgttaaaacaaggacagtaaaggaaagtcatgattatttatggtaaaatggacggtgaataattatggagggttatcgtggcacgagatataggaattgatttggggacagcaaacgtactgatcaatgtctctggtaaaggtatcgtattaaatgaaccttctgttgtagctgtaaataccgatacaaacaaggtagttgcagttggttcagaggcatatgagatggtaggaagaactccaggtaatattcgagtaattcgccccttgaagaatggggtaattgctgattttgacattaccgaagcaatgctgtcttactttattgaaaaattaaatgtaaaaggctttatgtccaagccaaatattttgatttgtgctcctactggagttacttcaattgaacaaaaagcaattattcaggcagctgaaaagtctggtggcggcaaggtttatttagactttgaacctaaagttgcggctgttggtgcaggcttggatatttttaaaccgcaaggtaatatggtgattgatatcggtgggggtaccactgacgttgcagttttatcaatgggtgaaattgtaacttctcaatcattacgttatgctggcgatcggatgaaccaggctgtcatcagttacattaagagtaagcataatttgttaatcggttctagaactgctgaacaaattaagattgaaattggtagcgcctttgaaccagaccaagatgaacaaattactgttcgtggtcgtgacgtagttgatggtttgcctaagcagactacagttactgcaccagagattcaaaaggctttagaaccaggcttgatgtcaatcattgcagcagctaaagaagtattggaaacaactccaccagagctttcagcagatattattgatcgcggaatcatgctaacaggtggtggagccctattaaagaatattgataagttgatttcttattatttgcaagttccagttttaattgctgatcatccattagaagcagttgctttaggaacaggtactttgcttaaaaatattgaaaagcatcaacgacactaagtgaggagattacttgcgtaagattttgatttttattgtacgtatttatcagacagtgatttcacctttactaccaccaagttgtcggtattatccaacatgctccaattacatgattgatgcattgaaaaaacatggtcctattttggggctgattatgggaatttgtcgtatactaaggtgtaacccatttatcaagggtggagtggatccagttcctgataattttactatttttcgaaatccacatccggagagatatgaagatccaattattgcttcaaaatttcatccggatagcaagtaggaggatttatgtctaaaaaattagagaatattgatattgaagttaatgaacttaagggaaagaatttgccaacgtgggaagttgttattcctaatagaaagtccattggtttaattgaaaaggtagaggggcgttatcgtgctactacttctaagacaagcaatattttgtttgctaacagtcttgaaagcagcattaatgacttactttcatactttaccttacatgaaaaataaaatataagtagtgattatttaatggcaaaagttgaaaatgaaacaagtctattcgatcgattagcctggaatattattataccagtgctactcttggctttaattagcttgtattgtatctatgttgctgcattaggtgatcctagtcatattggttcacctgttagggcagtagttatgcaggcattatggtacttgatttcaattgcaattattatggttgtgatgcagtttgatgcagaacagttgtttaagattgcgccaattttctttggaatcggaatatttttgctgattgcggtgctattcttatataacagaagcgtagctgcagatacaggtgcgaaaagttggttcaaactagggccgattacttttcagccttcagaaattatgaagccagcttttatcttgatgttggctcgagtggtcaaagagcataatgataaatatggtcacacgattaagaccgattggttgttattaggcaaaattattgcttggctggcaccggtagcaattttactaaagttacagaatgactttggtactatgttagtatttattgccatcgttggtggcgtggttttagtatcagggatttcttggaaaattattgtaccgttatatggtattttgattttagcagctattggggttattgtattagtaactacgtcggctgggcaatcattgttgagtcatttctttcaagcatatcaatttgaacgaattaagtcttggctcgatccatctggtgatacttcatcaggagcttatcagttatggcaaagtatgaaagccattggttctggtcaactatttggtaatggttttggcaaagctagcgtttatgttccagttcgtggatcagacatggttttctcggtaattggtgaaaactttggttttgtcggctgtgtagcattgattttgatttatttatacctgattattcaaatggtaaaaatctcgttcgataccagaaatgtcttttattcatacattgcaactggtgttatcatgatgatcttgttccacgtatttgaaaatattgggatgaatattgatttattgccattgacaggtattccattgccatttgtttctcagggtggttcagctctgatgggaaacatgattgggattggattaatcttgtcgatgaagttccataatcgtgattacatgttcagtacggctggcgatttttagaaataacattaaaaaaatcctccaaaaattcaaatctgaattttggaggtatttttttatcggttattaaagctaaataattagccttgcaaagcatccttaacttcttcagtacgacataccaagacgtcacatttagaagttctggttacgtattcggtaacactaccgatgagcagacgttcaacagcgttcaaaccagtagcacccacaacgattaaatcaatattgtgcttcttagggaagtcatgtccaatgattgtcttaggtgaaccaaattcaatagagtagtgaacatcttcagcgccagccttagtggcacgagcttggtaatccttcattctcttttcagcatctttagaaacttgttctaccattgctgaatcaaaacttgaaacattttggaaagaacgagtatcaattacgtgtaagatttctagtgttgcatggttacgcttggcgatggctacagccttgctgaaggccaagtcagcttcttttgaaccatcaactgcaacttgaatattcttgtattgtgaaagcatatataagcacctctttctatattctattttaccaaaattttgcttgtcattagtgaattattattctttattttgagtaattgataaaccaaaagccaaaatagttaataaagctaagaataaggtgattagatttaaatatttattacccatgaatagcaaaataatccctaaaatactttcagctaaaagggcgactgaagtccacttaagaatattgctcaagcgtggatcgccaccaatgtcataaattaaaaaatgtccgttccttctgtgccacatgtaccacgaggttaacagtaggagaaggataaaaataatcattacaatctttattgccatttaacagtctccactatagaaaaagacggtcaattgagaccgccttttttaatattctaaagaaatccgagttgactaaacatagcataatgacgcttgttgaacccgcaatgttcaaaattttagctggcatcgcagcgaatatggatcctgcaacaaggcagtattccgattcggtagttatttgccaactcccacgtcttatagtttgatcggtcaactttatacatttaagcttgtcgatcaactcagatcacttattataatacgcatattacaggtgcttgtcaaccatattgaatgcgcgagattagtgattattgcgcaagttatcagactgcatttgttttaatttttgataggttgccttatatctagcttcgattttagaattgcctttaggtgcaaagtagctggcatgaagcaggttattaggcaagtattgttgtgctacccaatcattttgataatcatgaggataaaggtagttcacgccatgtccaagctttttggcaccagagtaatgagcatcttttaggttggcgggaattgagtcaacttttttggttcgaatatcagctagtgcagcatcaattgctgaaatggcactattgcttttggcagaaagagctaactcaataaccgcattagccagtggaattcgtgcttcaggcaagccaaccatttgtgcagcttggatggctactatagcgtgttcagctgcgtctggatcggctagtccaatatcttcgtaggcaattactgctagtcttcgacagatagagactaagtcaccagattcaattaatcgggcaagatagtgcagcgctgcatctgtatcagagccacgaattgatttttgaaatgctgagactagatcgtaatgtccatcaccagaagcatcaaagttttgcaccttcatttgaattgaatcagccatttctttttgagtgatgataattttttgatcatcttggtgtttatcttgcaattcttgcttagttgaaagaacagctaattctaaactattcaaagtagaccgcaaatcaccgttgcctttttcaatcaaaagagcacgcgcatcatctgttaattcaacattatatttgcctagacctttttctttatcgttcaatgcgcgatcgattgcatgagaagcatcatctgtagaaagaggctttaattcaaaaatttggcaacgtgaacgaatagcaggggagatcgaaatataagggttctcagtagttgccccaattaaaatgatttgtcccgattctagcaaaggcagtaagaagtcctgcttagttttgtccaaacgatgaatttcgtccagcaataagacaactgtcccactcattttgccttcttcggctacttgttgcaattgctttttgccgtcagtagctgcattgagctttctaaaggcatatttagttgagcctgcaatagcactagcaatacttgtcttaccgatgccaggagggccgtaaaggatcattgaagacagaagtctagcttccaccattcggcgaataattttgcctggaccaatcagatgcctttgaccaacaacttcgtctaaattagttggtcgcatacgatatgctaatggtttcatttacttatctccgtgaaaaagtttatgccaaaaactttcttttgttttaggtgcggctaattcttctttaggaaactcaggtggataaacttgctttagctcaattcgtggtcgattgatagcgtttttcgctacaactagtactgccgtatcatgtggtcctgtttttgcggtttcattgttaactaaagtgaagggaatatcatatttgctgcaactggcttcaatgtctcccaagaagccatcatcagtgatattgccattgatcaaaatagtatagcccttaaagtcagtgatatgtttaagaaatagggcagttaattcaggatttttaacttcagtattgtccatacggattaagcagcgctcacgtaatgaacctaaaaatctgcggcgttcatcaggcttagtttgtggagtaataccttgagctgcttgttcaacacgtttatttaaatcttcagtcatctaatcatcctttctttttatgtacttattgtagcaaagaaaaaagcctttctcgattgagaaagactttcgacaaaataaaatgtaaaaattaaagtaacttgttgtaccattcaacaactaaggcttcatcaatttctggttccatttcgtcacgttctggtaaacgtacaagagtaccttccattttgttttcatcaaatgaaacaaatgatggacgagcagtaactgcttctaaggcatccttaacttgttgtaagttctttgacttttccttcaagccaatagtttggccaaccttgacttcgtatgaaggaatgtcaacacgcttgccatcaacagtaatgtgaccgtggtttaccaattgtctagcttgttctctagtagtagctaaaccaagacggtaaacaagactgtccaaacgacgttcaagtaaaatcatgaagttaacgccgtgttgaccttcacgaatcttaccagcgcgggtgaacaaagttctaaattgacgttcgtttaagccgtacatccaacgtaacttttgcttttcgtgcaattgttgaccgtattctgacaaacgaccgcggttgttaggaccgtgttgacctggagcgtagttacgacgagaaatttccttaccagtacctgaaagggaaatacccaatcttcttgaacgtttccaacttggacctgtatatcttgacataaaaaatcctccataaaatttaaacaataatttttggagtaaaatattaagcataagttcaacattcgtgcatcttggatttacattttcgcccaatgcagcgcgggttactcgttcactaaagcgtttcaagatgttgacgttcttgtcacttattgctgcaaatattttacacgaatagtattatatagagttcagaataataaatcaagaaaatagaacagctttttgcacctattagggtcaggttttgttataattatgatagttttggaggataaactatgtcatcaattcaagctattataattattgccgtggtgatcctaatcattgtcgtagttgcagcaatgctaatgatcaatcgtaaacaactaaaagaaattgaagcgattgatgcagcagtgactgaaattgagaagatgcatctagaagatgatattacgcgactggataaaatggatttggccggcgaaagtttaactacattaaatacttggcgcaagagctacactgaagcagctaagaaaaaattaccgcgagtgcataagctagttgaagaagctgctaatgaaaatgcaacttatcgcttgtttaaagcaagaaagaatattaaacaagcacaggagattatcaagccaacgctcgaagatgctcgtaacaccaaggcagttttcacggaactacttgaatcaaataaggaaaatcaaattcaatatgatgctttgattaaagtttatcgtgaattaagaaaagatatcttagccaattcctttgaatatggtgctgcgattgatcaggttgaagatcaactagcatcaatggagagtgactttgaagaagcaaaaaatctttcttcacaaggtgatcatgttgaagctaagcgagttttgtccaagattcggatgtctttgggtaacttacaaaaacgcttaaaaccgctaaaagagggttatcatcagcttgaagtagtgttccaagatcagcttaaggaattgtctgatgcttataaaaaaatgatttcagaaaaatattaccttactagcgtagatgttttgggcagaatcaaggaaattcatgatgaaattgatggtgcgcgcaaattgctagctgagactaaggtggatgaattagccaaggaaaataaaaagatctctggcgaaattgacgacctgtatgatgttttagctaaggaatacaaggcaagaccatttgttgaaaaaaatcaaagtaaaatgctgactttgatctcacatcagcaaaccgcgtcaaagaaactggtagaaaagttgcggcatattgatgagagctatgaattgactcatggcgaattggaaaagagtaaagacttagaaaaagaagtcaatgaaatgtaccatcagtacactattgatacacagaatatcgcagatggtaagggtgtttactctgctattcaagattcatggctccagatgctagatcgcctgcgtgaaattgatgcagagcaggctaagatgtcaactgacgttgatggactttatgattctgaaaatgtagctaatgattcaatcaagcgctttaagcaagaagtttcattagtttatcgtcgacttgaaagacgaaatttgcctggcaatcctgatagctttgtccaaatgtacactttggtagtcaacgagattggtcatgtcagcaacgaattaagtcaggtccggattaatatggaaaagatctcagctgaattaattcaaatttctgatgatgtggagcggcttaaacgtgaagcagatgacatcattaattccgctaacctagttgaattgacgatgcagtattcaaataaatatgcagataaggattcaattgcgcaagcacaaaagacagcaatgcagctatataatgaatataactataaggaagcccttgatacaattgctacagcaattgaaaaggtagagccaggtagttatcaacgacttgaaaatgcatattattcagaagagaagagtaattaattgaagcgattcattatttaagctaaaattgaaaagtcttgaaacggtcaagcgattgaccgttttttaaatgaaggggtaatgatagtgatttattttgataatagtgcaacaacgaagatagatccacaagtattggatacttacaataaagtagcgactaatatttggggcaatccttcgagtttgcataagatgggtgatcgtgcacaccaattgcttgaggcgtcacgtaaacaaattgctgatttgctggggactaagcagcatgaaattttcttcacttctggtggaacagaatcaaataatgccgcaattaaggggactgcaattcaaaagcgtgaatttggtaagcatattatcacttctagcgtggaacatgcatctgtagccaatagttttaacgcgttagagaatttgggttggcgcgttaccagattgccagttgataaggaaggccgagttaacgttaatgacttaagaaacgcgattgattctgatacaactttggtttcaatcatgggcgttaataacgaaattggcaccattcaaccaattgatgagattagcgatttgcttgaaaattatccaacgattcagttccatgttgataacgttcaggcacttggcaaaaatatttgggataaggtttttacaccaagagtagacctctcgagcttatctgcgcataagttccatgcaccacgtggtataggtattttatataaaaaagaaggcaagatgctgaccccattacacgatggtggtggtcaagaaaagggcttgcgttcaggtactgagaacttgcctgcaattgcgggaatggctaaggcaattcgtttgcttttagaagatgaaccagaaaaggccaagcgtgaagcagaaattaaggctaaaattgttgattatctaaaagataaaccagggattaatattttttcaccagtaagcgatggctttgcaccacatattctttgctttgctttagagggaattcggggcgaaactttggttcatacgctagaagatcaagatatttatacttcaactacttctgcttgtgcatcaaagacggcagatgaggctagcaccttggtttctatgcgaattgatgataagattgctactagtgcaattcgtttaagttttgatgagacgaatacgcttcaagaagcggatgaatttattaaggtctttgacaagatctataatcattttgctaaaattaatcatttgggagaaaattaatggaatacacagaagttatggttcgctatggcgagctttcaactaaggggaagaacagaaaggacttcatcaatcgcttagcaagtaacgttgaaaaagttcttaaggatttcccacaaattgaatttcatcctcgtcatgatcggatgcacattgtcctgaatggcgcatcattcaaggatgttgaccaacgtctgaagaaggtatttggaattcaaacttactcaccagcaattaagattcctaagactcttgaagatattgaaaagacttctttggaattgatgcaagagacttttaagccaggaatgacttttaaggttaataccaagcgtagtgaccacaagtttgaatacgacactaatcaattgaataatctagttggtgactacttgtttgatcatatggatggcttgaaggctgaaatgaagcatcctgatttggtcttgagaatcgaagttcgtcaagatgccgtttatatttctaatcagttgctccatggtgttggcgggatgcccgttggtactgctggtaaggctgtgatgatgcttagtggtgggattgattccccagttgcttcatggctggcattgaagcgcggagtagatattgaaatggttcacttctttagtccaccttacactactgaaaaggcattggctaaggctaaggaattgactggtattttggcaaactacgctggtaagattaattttattgccgtaccgtttgctgaaattcaagaaacgatcaaggaaaaactgccagaaggctatttgatgactgtgcaacgtcgttttatgttgcagcttgctgaccgcattcgtgcacaacgtggcggcttggctatctttaatggtgagtcagttggtcaagttgcttctcaaactttgcaatcaatggtggctatcaatgatgtaactactactccggttattcgcccagttgcaacaatggataaaacggagattattgccaaagctgaagagattggtacctttgatttatcaattcaaccttttgaagattgttgtacaatttttgctccaccgcgtcctaagactaagccaaagttggaaaaagcgcgtgaatatgaagctcgtcttgacgttgaaggcctgattgaaagggcaatggctggtattgagattacgccaatttatccaaatgaaaaattcttggatgataaagctcaagaagacgctgacttgttatagaggattaatttcactggtgtttttgaaatttaatatgatacagtttaattatttagaaagatatggtgttaatatggaaacttctagtagtattatgtattgatttaaagttaatataataggcacgcgcaaaacgcgcgtaaaaacggtcgatttcgttttcgaccgtttttttgcgcgtgaaagagtataattataactaaatagtttagaaacggtgacctaaatgagagaaaccaaaaatttagaatttaaagagaaattgacgaatacttttctaaaaacggttagtgcatttgcaaattatggcagtggcaaaattaaatttggaataaaggatgatggatcaatcgttggtgtgaaaaatccagttgaattttgtttaaatgttgaaaataaaatcaacgattcgatcaaaccaaatccagattataatttagaaattgatcctaaaactaatgtggttactttaacagtaaagcaaggagttaatcctccatatttatacaaatcaaaggcctataagagtaatgacagtgcttcgatcgaagtggaccgatctgaattatcacagttaatcttaattggtgaaaatagaacctatgatagtttaaccgcgatgaaccaaaatttgtcatttaacattttagaagaagcattaaaagaaaagataggaattaaaagtttaacatctgatatattgattacgcttaatttagagcgtaaggatactagttacactaatgccggtgagcttttggcagacaaaaataattatcgtggaattgatattgttcggtttggtgaaagcattaatattatgcttgatcgagcaagttatgagcatgaatctattcttaaagagtataagcaagcaattcaaaaatatcgtcaatattatcaacatgaagaaatacagggagcaacgcgaaatattgtaagtcagattccagaagaagcttttcgtgaggcaatagccaatgccttagttcatcgagtttggaacattaattcgcaaattaaaatttctatgtatgatgacagaattgaagtagtatctccaggtggattgccacaaggacttagcaaagaagaatatctttcaggtcagatttccattttgcgtaatccaattattgctaatgttttctttaggttaggattaattgagcaatttggtacaggtgtaagaagaataaatgattcttatagaagtagtttggttcaaccgcagtttgaaatttttgataattcgataaagataatattgccagttttaaaatttattacggacgatctgtctaatgatgaaaagaaagtatatcaaataattcatgaaggtgcggatactacgaagcaaattagccaaatgagtaagtttggtaggacgaaagttttgaagattttgcggcaactagaaaaacaaggttatattagaagaatgggtgaaggcagagctacaaaatatattttaagcaaataatcgcgcgcaaaacgcgcgtaaaaacggtcgaaaacaaaatcgaccgtttttgattagtgtcgcaattcgaaattgggttaactttcttatataattaatattaatcaacacataagaacgaaagaaagacataatgcgcatagataaatatttggccaatatgaatgttggctcacgaaaagaagtacaccaattaattaaaaaaggaattgttgcggttaatgatgtgattgttaaaacgccaaagcagcaagttaaagaaagcgatcaggttaccgttaacggagatgctgttgcttatcaaaaatatcattatttcttattgaataaacctaaaggtgttttgtcagcgacggaagatcgcaatcagccaacggtgatttccttgcttgcaccgcaggaccgttatcaaggaatcgtgccagttggccgtttggacaaggatactactggcttgctccttttgacgaatgatggtcagttgaatcatgaattgcttgcacctggtaagcatgttgataaagtttatcgtgctgaaattgctggtgtagctaatgatgcaactgttaaaacttttgcttcaggaatgacactaggcgatgggaccaaactgcagccagcagaattgaagatattatcccaggatgaagagcacgataggtctacaactgaaattaaaatttgtgaaggtaaatatcaccagatcaagcgtatgtttggtgcggtagggatgaaagtcgttgagctagagcgaatttcgatgggaaagttaagcttgcctgctaacttaaagcggggagaatatctggaattgaagttggaagatatagttgggtaaaactttaaaaaacttcaatttctcacaaaaaaattgcacttttttgcgtaataaatagtggaagataattctgtcctactatttatgaaagaggtgcgcaatggaaaatacgcacaagaaaaagaagccctggtttggcttcacagaggatgtaatctttggtgagattatgtctaacaagaatttttgcaagcatgtcctacagggactggtgccggagattgagattagagatattcattatctgcagaagcagagaaaggtcgctgatcccaaacaccctaagcaaaaagctgttattctcgatattttggttgaggatgttgatggaaatctgtatgattttgaaatgcagcacatatcaaaatttaaagtgttgctatgttatctttctctgcatgtttgatccacaaggcaggcataagattaagagttcctatcatttgtatgaggatactaacaagacagatagattgaatgacaaaaattataattaatgcaaaaggtgttcctattaaagttttaactttaataatgaaaacgtagagcttaaaaacaatgatataattaagaccatattagttaaatatgttgaaatccaggacctcttgtctggattttttattaggaataattatggaaaaaatcaaaacagcaatctattcagaagattttgttcaattagtaaagtatgttctaattggcgtattagggctagtcgttgattttggaatttatacaattttgacgcatttcaagatgaatgttgaaatagctaacattatttcgtctacctgcgggatcatcaataactttttatggaattcttatactaactttaaagttcatgatcgcatgatattaagatttatttcttattttatcgttggtcagattaccacggtatttactacggtttccctatttattttcgttactaaattgggttatccgcacttaatcgttaaaatagtagcaacttttgtagcaactttaattcaatttgtaattaataaagtagttacttttagaaaagctaagaaagaagaaatctaatggaaaaattatcaattgtggttccttgttttaatgaacaagaaacaattccacttttttatccagcagtgcaaaaagtattagctaaaatgcccaaagtgacgcccgaatattggtttgtagatgatggctccaatgataacacactgaccgaattgaaaaaattgcatgagcaggacaaacatgttcactatatttctttttctcgtaactttggtaaggaatccgctatctatgcgggcctatcagctgcaacgggagattatattgtcttaatggatgtagatttgcaagatccgccttcacttttaccaaaaatgtataaaattttgcagactggtgactatgatgcagttggctgcagacgagtagatcgtaaaggggaaggtaagtttaagtctttcttgagcaatcaattttataaggtggttaatcgcatttctaaagtggaaattgtttcaggcgtacgcgactatcgcatgatgaccaggcagatggttaacgcagttttatcaatgaaagaatacagccgcttttctaaaggtatttttgcttgggttggttttaagactaagtatcttgagtaccacaatgtcgagcgcgtagctggtgaaactgattggacgactcacaaattattcaaatatgcgttgggcgggattgctgatttttctcaagcaccgcttaacttagctgtttggattgggataacttcattcattttgtcaattattggtcttatttttgtaattgttcgtaaactaatagttcctggttcaagtattttgggctgggccagcacaatttcaattattttattgattggcggtttgcagcttttgtgtatcggaattattggccgttatattggtaaaatctatttacaagttaaagaacgaccaatttatattgtgaaggaagagaaatgagaaagagccgtaaattggtgaatgtctgggatataattctcaggcattttctttttttattttaatttctcacaaaaaaatcgtgcttttttgcgtaataaatagtggaggataattttgtcctactatttatgaaagaggtgcgcgatgaaaaatacgcatacatcacgattcatgaaaagcaataccaaagtcattttgtatcatggaagcaatcaggctgtttatcagcctcgtataaataaaaatgtttttacaactgattttggtaatggcttttatgtgactgctaatcgtagacaagcagaaaaatgggcaaagcgtaaggctagatattcaggtcaaccgacattaaatagatatgtattcgatgctgatcaacccgacttgaaaatattagtttaccaagcagatattgattggattaagtttgtcattcaaaatagaatgaataatataaaagataattctgatatcgtcattggcccaacagcagatggtaaacttttttctgttgttaattgctggaaacatggtaatctagatttagatgaggctctgctaaaattaaaaccgagtgtttattcggagcagtattgtttcaagacagaaagagctctcaaagctttaacgttcatagataaggagttggttagatgattcccgaaattagtgaaaagcaatttcatcagcaactagctgaagcaattagcgacttaattgctaagagattaaacatttatcctaagcaggctctaaatttatttgagaagtcacgtgtttataaggatttaatgaattcagatgatgaatttgatcaaatgatgccagctgatttttttgatttgtggaaaaatgagcgtttagtcggtgtaccagttagttcggctgatattgctaacggattattgaaagataagaagtacaaatgattatcttattgctcggaatggagtgattatatcatggactacgaagagaaaatactggagcgagaacaagacgcacgtgaggaaggtaaagaagagggacttaaacgaggcgtcaaaattttagtttcttcacttaaaagaactggtaataccaagcaagagatcatgcatctccttgaacaaaattacggttctgattttaccgatgaacaattagaaaacttcctaaaagaaagttaaaatagcttgccaactacctacttgatatggtttaattatgtacaagtaaatagggagtaatcggcataaattgtatttacggcgtcagaacgaaatttattttccgctgtaagtttaaatgatgagactattgactaaacagtgttttagccagtagtctctatttttttgcttaaattactcttatgtttagggagggctttacatggaatactatcgtcagaaaaaagacgagatagctaaagagttaaataccgatttaaagcaggggctgagcgctaaagaggctcaagagaaattagctcaagttggtccaaatgctttagttgaaggaaagaagaaaattacttttcaggtctttttagaacaatttaaagacttaatggtgatcatcctaattatcgcggcaataatttctgcttttacgggcagtctggaaagtacgttggtaattattgttgtattgattctgaatgcgattttgggtacggtacaacatgttaaggcggaaaagtcgctagaatcgctaaagtcattatctgcgccaacggctaaagttttgcgtaatggccaaaaaatggagattgaggccaaggacttggtacctggcgacattcttttgttagaagcaggtgacttagttactgcagatggtcgaattttagaaaattattctctgcaagtcaacgaaagttcattaactggtgaatcgactaatgttgacaagttggacactgattttgaaaaagaagtgccgctagctgatcgggttaacatggtttactccagttccttagtaacttatgggcgtgctacggttgtggtaacggcaacggggatgcagactgaaattggtaagattgcttccttgatgaatgaaactaaggaacgtcgcactccgctgcaagtatcacttgaccagttttcatcacgattggctactgctattttaatcttgtgtgctgtgatctttggtattcaaatgtggcgtggtcaaccgctgcttgattcactgctatttgcagtagctttagctgttgctgcaattcctgaagctttgagttctatcgtaactattgtgcaagcaatgggtacgcaaaaaatggctaaagaaaatgctattattaaaaacttggcagccgtagaatctttagggtctgtatcagtaatttgttcagataagactggtacgttaactcaaaataagatgactgttgaggacatctatattggtggtaaagttttaaagccaaatgagctggatttgagtaatcaacttcaccgctacttgctttatgatgtagtgcttaacaacgatgcaagtttggccgaagataaggcaattggtgatccgactgagtcagccttgctggaaatgtatcgtcaagtgcccggaattgacttaggtaatggtgttttaggcttatcagaacaagaattacgcgaacattctaagcgtctggaagaagtaccatttgactcagatcgtaagctgatgagtactaagcatttgattcatactgtaccaactatttttgttaaaggtgcaattgatgtgctcttgaaacgctgtgtcaatattcgtttcggcgatgaaattcgtccaatgactgaagaagatcgtaaagaaattttggcacaaaacaattacttttcagaaaatggtttgcgtgttttggcttttgcttataaagaaagtgatgaagagctttctactgaagcagaagatggcttaacttttattggccttgtttcagaaatggatccaccacgtgaagaaagtgtagctgcagttgctcgtgctaaggaagccgggattaggactgtgatgattactggtgaccataaggtgactgccgttgcaattgctaagaaaattggtattttcaatgaaggtgacatggctttaactggccttgaattagatgctttgagcgatgaagaacttgatcaaaacattgagaagatttcggtttatgctcgtgtatcgcctgaaaacaagatcagaattgttaatgcatggcagagaaaagatcgtatcgtatcaatgaccggtgacggtgttaacgatgcaccagccttgaagaaggccgatgttggtgtcgcgatggggattactggtactgaagtatctaaagatgctgccagcatgattttggccgatgataattttgccacaattatcaaagctgttgctaacggtagaacagtttatgaaaatattaaaaacgctattggctacttgttatcaggtaacctttcagcaattatcactgttttatttgcttcactcgctggcttaccagtaccatttgtagcggttcaattgctctttattaacttggtaactgattcgcttccagctttagcaattggaatggagccaggtgatccagatattttgaaacgtaagccacgtgatcctaaggctggtattttggacaaagcctttgtgagtcaaattactattcaaggtttgttgatttcgattagtgtaattgctgcctttttgatcggactaaaagatagtcctgcagttgcaacgacgatggcgttctcaacattgacatttgctcggcttttacatggcttcaattgtcgttcacaacacagtatcttcaagatcggtttcaaaaataactggtacagtttagcagcatttgctgtcggaacaattttgttagccttgattttgtttgtaccggcgttacatagcttgtttgcagttactccgttaactgggcaagaagtaatgtggcttgctggcttggctctgattccaacgattttgattcaagcagttaagatgattagaaagtagaatattttagataatcctcatgaagtagtaactacttgatgaggattatttatattttaaacagattttatgtataaaatgcaaaaatatgataaaatttagcctgaataaaacaattttaggtgaataattatgaataaaaataaattatactttttaaaattagaaattcaaaatcatccgctatttgaggatgatcttgaattttcactggtcagtgatgcaagggttacttctaatacctctgatcgattaactcatttgctcggcagtttatgggtgaataatttaatcactctagtagggactaatgctactggaaagactacgatcatgaaactcttgataggaattcttcaaacagttgtgatggaaaagtcaattgatcaaactaagctaacggatgtgctaataggaaatgagcctattagtgttacaacttatttttatggaactgatcatgtagtttataaggatagtttagttttcaagttaaagaaaactttaagtaaaagctggcatattgagtctgaaacggtatatcgaaaaaaggtaactgttaatctttcaaagaaaaaattatttgatttcaaaaatataaaaccagaattagacagaaaagaattaggcgacctagcttcttcaattttgtcgtctgatgattcgatttttagagcgattatttcgaaaaataagtattatcctcaaataccatttgatactttgttctttactgactttaatgcattgatgtatggttctggcaatgtgcctggagaaattttaaactttttagatccaacaattgaatatcttaaaattgaaaacaagcctgagggctctggtgctactaaacaattgtttaagctgaagtttaaagggaaagatacagagattgcagaaaatgattttacaacgattgcaaaatacttgtcttctggtacagctaaagggataactctttatggcgaggtaattaatgcactttccgttggtggcatcatctttattgatgagttggagaatcactttaatcacgctattgtagattcttttattgagtattttactaatcctaaaatcaacataaatagagctactttggtatttagtacgcactatactgaaattttggataaaattgaaagaactgatgaagaatatattactaagagagaaggcaagattcagcttcaaagatattcaactgctgatgtaagaagcgatctaaataaagccgatgtttttgaatcagattatttaggtgggacagctccagattatgatgcctacatggctttaaagaaggctacagaaaaggcggttaaaatggatgagtaactctacagatctaatcgctattattgtagaaggtcatactgaacgagcaattatggaagttctattggaacacgatgcactaaaattcaacgaggatgatcttcttgaaggtgaagtaattagagcacgaaatgctaaaaagtttgctaaagaatttttgaataaagggtttagaagtagaaaggttaaaatttataggatacttgattccaaaaccgaaaagtttaatcttccagaagtgtataaaaagaaagtatccgaagtagtagaacttcgtactagacctgagattgaaattctagacattctttatcatcaagactatcagcgatatacaaataactataaaagtaaagtgaagcctagtgattttgttaagcagtattataacgatcttaagagtgtgaaatcttatgatgaaaattattatttttggaatagtcactatgatgatttaatcaacgtgttaaaacaatataagcaatatcattcatcggaaaaatgtattgctgatttattaaaagaataaagacatatggctaacttaattacgactaattcctaacccttttttctgagtgaagttcatgctataatcataaccaaagcaagaatcaagaggggtcgactttattaacagagaaaagccagacagctgagaggccgaaggttgactagtagcttgattagctgattaattgaaaataaaaagtaggttaatccggtatacgccgttatcgtcttcaagagaagcatgtttgatacatgcttaacgtaggtggtaccgcggtttaactgatcgtcctagacaatatgtctaggacttttttattggaggaattttatgacagatttagcacctaaatacaacccaaacgaggttgaaaaaggtagatatcaaacctggcttgatgaagatttatttaagccatcaggtaacaaaaaagctcacccatattcaattgttattccaccaccaaatgtaactggtaagttgcacttgggtcacgcttgggatactgcaattcaagatactttaattcgttttaagcggatgcaaggctatgatactctttaccttcctggtatggaccatgctggtattgctacccaagctaaggtcgaagcaaaattgcgtaaacaaggcaaagaccgtcaccaaatgggacgtgaagcttttgttaaacaggtttgggattggaaagatgaatacgcatcaatcatcaaaggtcaatgggctaagatggggctttcacttgattattcaagagagagatttactttagacaagggtctttctaaagctgttaaaaaggtttttgttcagctttacaatgaaggcttaatttatcgtggtgaatacatcatcaactgggatccagcacttcaaaccgctttaagtgatatcgaagttattcacaaagatgataagggtgccttttaccatattaagtatccatttgcagatggttcaggttatgtagaaattgctactactcgtcctgaaacgatgtttggtgatactgccgttgcggtagcacctggtgataagcgctacaaggatattgttggcaaagaattgatcttgccacttgttggtcgtcacattccaattatcgaagaccaacacgttgatccagaattcggaactggtttagttaagattactccagctcacgaccctaacgacttccaagtcggtaaccgtcataatcttgaaagaatcaatgttatgaacgatgatggtacgatgaacgaagaagctggcaagtatgctggtatggatcgttttgaatgccgtgaagccttagttaaggatcttaaagaagaaggttacttgattaagatagaaccaattgttcactcagtaggtcactcagaacgttctggcgttcaagttgaaccacgtctttctaagcaatggtttgttaagatgaagccacttgctgacaaagttttggaaaatcaaaagactgatggcaaagtaaactttgttccagaacgatttgaacaaactcttgatcactggatggaagatgttcacgactggtgtatttcacgtcaattgtggtgggggcaccgaattccagcttggtacaataagaaaactggtgaaacttatgtaggtgaagaaacacctaaggacattgaaaactgggaacaagatccagacgtacttgacacttggttctcaagtgcattatggccattttcaactttaggttggcctgatactaatgcggaagactttaagcgctacttcccaactaatgccttggtaactggttacgatattatcttcttctgggtatcaagaatgatgttccaaagtttgcactttactggcaagcgtccatttaatgatgttgttttacacggtttaatgcgtgatgaacaaggtcgcaagatgagtaaatcacttggtaacggtgttgacccaatggatgtagttgataaatacggtgccgacgcccttcgttggttcttgcttaatggtactgctcctggtcaagatactcgttatgatcctaagaaattatctgctgcttggaacttcattaacaagatttggaatgcaagtcgttttgtaatcatgaacttgccagcagatgctaaaccagctcatatgccagatgcttctaaatttgatttatcagatcgttggattttcgatcgcttgaatcatactgttagtgaagtaactcgcttgtttgatgaatatcaattcggtgaagctggtcgtgaagcttacaactttatttggaatgacttctgtgactggtatattgaaatttctaaggttgctttgaatggtgacgatgaagaattaaaggcaagaaagcaagaaaacttaatttggattcttgaccaaatcttgcgtttgcttcacccaattatgccatttgtaactgaaaaattatggctttcaatgccacatgaaggtaagtcagttatggttgctgaatatccaactactcacaaggaatttgaaaacaagcaagcagatcaagacatggccttcttaattgaaactattaaagcagtacgtaacatccgcatggaagttaatgcaccaatgtcaagtcaaatcgacatcatgattcaattagacgatgaagctaacaagcgcgttttggacgaaaatgctgattacgttgaaaacttcttacatccaaaggaattgactgtagctagtgaagttgaagcaccaaaattagctaagactgctgtaattccaggcgcacaaatttttgttccattaactgaacttgttaatgttgacgatgagctagaaaagatggaaaaagaagaaaagcgtcttgaagacgaagttgctcgttgtgaaaagaagctggctaacaaaggctttgttggtcacgctccagaagctgttgtcaacaaggaaaaggaaaagaaggctgactacgaaagtcaattagccggtgttcgtgaaagaattcaagatttgaaagagagtaaataattgaaatttactaaagctcaagaagtaatcgattacttatatgctttgcctcatttacatcctaaaaataatttgtcttttattaagcggttattgttggaattaggcaatcctcaagatctagttaaaacgattcacattacgggcactaatggtaaaggttcaacttcatactatttatcaaacctactaaaaaaggctggtcaaaagactggcctttttgtctcaccgtatgtctatgaatttaatgagagaatacagttaaataatcaaaatattagtgatcaggatttagttaaaacagctaatattgtgcagggtacttatgagaaattgcagcagcaggactcaactttttcgttagtaacctttgaatatgaagtcgcactggctttcgtctattttgctcaaaaaaagtgtgattatgctgttatcgaggtaggaattggtggagaacatgacaagactaatgtaattatgccagaagtaagtgttattactacaattggtctcgatcatgaaaaaattattggacctacaattcaggatattgcacgtgagaaaagcggcattattaaggcaaaaagaccagtagttttaggtaacgtgccagaagttgtttggccaattttgaaaagtaaagccgaagaagaacatgcgatagtttatcaattaggacgagactttagtgttttgcttgataatcaaattgtttatcaagatcacaaaagaaagctagtttttgctttacgaccacaagttgaagcctatgatattgccgttgcctgccaggcgttctttttgttgaaactgcctttatcaaatgaagaagttgaaacagcgattaatcaaacgattattccagggcgctatcaaattttacgagaaaatccgctaatcattttagatggagcacataatattcaggcaatgagtaatttgctggcagtcgttcatcgtatgacccagcaaaagcatggcaagctttatgctttagtgactatgatgaaagataaggatcttgagcaggtgtttagcttgtttgatgataaagatgaagttttactgacaactttatcttatccgcgagtagctaaaaaagatgattttccaattgatgtacaaaaaagatataattatgaaaaagattatcgagctgcttttacccagctgcgagatcacttgggagctaatgatattttaattgttagtggatccttttatttggttagtgctattttaaattggaaaggaaaacgtgatgcgcgtacaagggctagatgatgatattcaaggcattatctttgatatggacggtttgctagttaattcagagaagctgtattgggatgctaatattcaggcggcagaagaagagaatttgggcacgccgcgggatgcttatctcaagttaactggtgctacagttaaagagatgcaggatttttatcataaatattttaaaactgaagcagaccgtgatcgttttattaagcgaactgatgacttggtgtggcaatggactgatgagggaaagttaaagctgcaacctggtgttcaagaagcattagacgaatttgaaaagcgtggcttgaagatggcgattgcttcaagtaattatgaaaatgtagttcagcatgctatgtgggtgactggaatcagaaattattttgattttcatcttagttatcttgatgtacaaagaggtcacattaaggctaagccggcaccagatatttatctagaagcagctaagaaaatgaatttacctaaagaaaatattttagtttttgaagattcatcaaccggtgttcaagcagctgctaatgcagggttaaaatgtgtgatggtaccagatttgaaagcaccatctgttaaagataagcagaatgcaacgatgatttgtcaaaacttttttgaatttctgaaaaaaatttagctcttttttgcgtaataagtaatgagggggattttatgttaaaaagaaaaccaaatcattactttgtcaaaacagatttagagctattgacacaattatttgaacaactagaaaataaaggaattcatacgttgcaggacttaaatgtttttctgaaaaacacagggttaaattcgtttaatgatctattaaagtttattaccagttcagaatgctcggatgaacttgctattacggctgaggcagtactagatcgtttgcgctgcgcttcacctaagagaaagacaattttgacatctagcattgaagtaggtacgtatttagctgataagctgataggacacaagcaggaagaattgtgggcattgtatattgacaatagcaaccacattattgctgagaagaaactatttcaagggactttgaatagatcaattgctcatccgcgggaaatttttcggtgggcagttatttatggctgctctggaatttttattgctcataatcatcctagtggtaaattaacgccatctgcaagtgacttggaattaactgaaagtttacgtcaagctgcaaaaatgatgaaaattgatttcttagaccattttatcgtgggagaaggtcaatatttaagtttgcgtgagaaaaattgttttaaagttctttaaaatttgtgtgaaaggcgcctttaaagttatagtatgctataattagtcaagatttagagaccgcaacagttaaggagagatttttgtgtttggattaggtacaaagaatattggtatcgatttaggtacagccaatacacttgtttatatggaaggtaagggcattgttcttagagaaccttcagtagtagcaaagaatacacaaacaggcgaagtaatcgccgttggttcagaagcaaaagaaatgattggtagaacaccaggcagcattgtagctattcgtccaatgaaggacggtgtaatcgctgattacgatactactgcagcaatgcttaaatattttatggaaaagactgttggtaattccaagccttcagtaatggtatgtgttccttcaggtgttactgaagttgaaaagcgtgccgtaattgatgcagctagagttgcaggtgctcgtgaagcatttgtaattgaagaaccatttgcagctgcaatcggtgctggtcttccagttatggaccctactggttcaatggttgttgatatcggtggtggtactactgatgttgctacaatttcattaggtggaatcgtttcatcaacttcaattcgtcaagccggtgataagtttaataatgcgattgttaactatgttcactcaaactttaacttattaatcggtgaaagaactgcagaagacattaaaattcaaattggttcagcttcagttgaaaaggctaaagaaattgaatcaatgaatattcgtggtcgtgatttagtaactggtttaccaaaatctgttgatattgaagcagttgatgttgccaaggctattcaagatgtagttcaagacattatcgtagctattaaggagactttggaacaaacttcaccagaaattgctgccgatgttattgatcatggtattgttttaaccggtggtggtgcactcttgaagaatttgccagaagttatttctgaagcaactaaggttcctgtgtttattgctcaagatccacttgattgtgtagcaattggtactggtgaatcactcaagaatattgaagtaatgcgtagaagtcgcaaataataaaaaagccggctgttgccggtttttctataggatcaattcttaatgaaaaaatttctgcaaaataaaaagttattatcagcatttattatagtagttgttattttatccgttttgggtgggagtgttagcttgcgcaataggcgcaatacacctttactgattcaaagcttgggtaacgatgtcgttgctttaggtactagaattgttgatgtaccagtagggctcgtgtcaggcggattaaatagtgttcatgatattttaaatacgcaagaagaaaacaatcatctaaagcgagaagttactaatttaggccagacgaaggctcgcaattcagctcttgaaaaagaaaataggcaattgaagtctgcattgaaattaaaagatacgttaagtggctataccatggtcaacgcctctgttatttctcggtcgcctgatacatggtcagatttattagtgattaataaaggaagttcagctggaattaaaaagaatatggctgtcatgtgcgatggcggtgttattggtcgaattgtagaagcaaatgctgcttcttccaaggttgaattacttactactactgatgagtcggctaatcgcttctctgttcaagcggatgctgcgaatggaaaaacagtacatggtattattacagttacttccaataattatcttgcctttacacaggtggttgatggtcgcaaactgaaggccggcacgagagtatatactagtggtatgggcggtaactcaccaaaaggcttgttaattggtacagttactacgacaactcgtgattcatttggtctatctgatcagattagaattaaaccagcaggtgatattagtgatccatctgttgtaactgtaattgaaagacaggtggctaattaatgtctacgtttcgaaaatgggttttggcaattggcttatttattgcattggtagtagacggtgtatgtgcactttacttacatcagtttatgacttatgacaactttgcagcgtcaagcgtcattttgccaatcagtgtaatgttgattggtctgtttgatgatactaatgataatgaaatttggttagcattaggtgcaggaattgttgctgatatctatttttatggcattatcggtgtttatacagttttcctacctgcaagttgctggatctgtcaaaaaacagctcgttttttaccggaaatgttatgggctagattaattgtcgttttattaggaactgcagtttttgttgcgtatagttggctcatttttaatatggtgggtattagtgctgcatcagcacacgtattattaatgagcattttagtcagtttaggttgggcagttgtcttcttttttctcttgtattggatttggggcaatttagctcaggattatccattcttaattgatttaaacgcttatcgagtttaaaaaagacgcggaagattttttctttcgcgtctttttaatccttaaaaactttgaagtgagatagcagcttgagcaataacagctgctaaagtaataattgccatgatccaagccattgcaatagttaatttttgaaaacctgatttctttttcttttttcgtgccataaacagccctcctatttgaacaatattttatgcttattaacggtttttttcaaatcaattatagtttagaataaaaagaatggaggaatacttatgctttatattttcctaattccaattattggcttagtagttgctttttttatcaataaaattttccctaaagcacagtttagagggtacgatgttatgccatttttctttctttcagcttgtggattaattactttacatatgaataaaccttcttttttaccttatggttttttatgctattttgtattagtgattgttgtgtcgctgaacgatgcgattagaaataaaaatatttctttaggaaaaacagttagaaaattatgggattatttgactgcctgtactgttttctggtatatcggacttttattgatgctagtgttataaaataaaattacttgtatatgcttaagtcgcaaaatttcaatattttgtgacttttttttattttgaaaaatcacaataaaaaagaaatttaaaaatctgtatttttttcttatgaatgtggtagagagtggggaattgtggtaaattatttagtggaagggggctagaccatgttcatgggtgaatatcaccacaatcttgatagcaagggtcgcctgattataccagcgaaacttcgcgatcagattggcgacaagatgatattcacgcgaggaatggaaggctgcatttttggctactcgatggaggagtggtcgaagattgaagctaaattagcaaaacttccgttgactaagaggaatacacgtaaatttatgcgtttattctactctggtgcgatggaatgtgagtttgataagcaaggtcgcgttaatctgacaacaacgttgaaaatgcatgccaaactcattaaagaatgtgtcatcattggtgtctctgatcgaattgaaatttggtcaaaagaacgttggactagttttgaagaagaagctaacgaagactatgatgatattgctgaaaatttggacgacattgaactataaaaaatatgaaattcaaacacaccagtgtactcttacacgaaactatcgacaatttgaaaccaaaaaacggtggtctttatgtagatgcaacttttggcggtggtggacatgctaaatatttgctcagcaaaattgacaccggtacgcttgtaggttttgaccaagatgaatatgcgataaaatcggcgaagttgaactttgcgaatttattacaactggatagtgagccaaggttagaattggtacatgacaactttagtaatctggaaaaggacctggtaaaactgggttactcagatggaatagatggcatttactatgacctaggtgtatcttcccctcaatttgatcaagcagatcgcggtttttcatatcgttatgatgcgcgattagatatgaggatggatcaaagtcaggacttagatgcttatcagttagttaatactttaagtcaaaaagaactggcagatattttgtatcaatatggcgatgaaaagttttctcgtcaaattgctcacagaatcgtagaaagacgacgggaaaagccaattgcaacaacttttgaattagttgatgtgattaaagatgcgattcctgcgtatgcacgaaggactggagggcacccggcaaagaagagttttcaagctttgcgggtcgctgttaatcacgaacttgatgttttacaagcttcgctagaggaagcaattaagatattgcgtccaggtggtcgaatcagtgtaattacgtttcagtctcatgaagacaagatcgttaaaaggatttttaagaagtattcagaagttgaggtgccaagaggaatgccatttataccggacggtatgaagccaacgctacgtttggtaaatcacaaaccaattgtagcctctacttctgagttagagaacaacaaccgctcacacagtgcaaaactacgggttgcagagaagttataaagaggaaaatgttatggctgatagctcagcaagaaaaattgaatatgaaccaagtagtagaaatggttcgcaaagacgacaacgaattatccttgatccgcgtaaagttccttatagtggcatagaaaaagctttgatgattattggaagcgtcattacgttgggcatgatgatctttctagtttcttctagtatttctgcaacttcggctcaacatgaattgactagaactcaacaaacagttgctaaggaacagaataagattaccgatttacgtcaagagattggggagttgacctctacttcacgtttaaataaaattgcacgtgaaaaaggattaactctaattaacaaaaatattaggacgattcgttaatgaaaaaaaacagtaatttaaaattacaaaaatccaaagcccacggctaccgctttacggtggggagatttctccaaatggccgtggctttggtttttcttgtatttacggctagatttttatatatcggaatatccaagacagttaatggtcaaaatttatcacagcgtaccaagcagctttataagcgcaatcaggtaattaaggccacgcgagggactatctatgatcgaaatggattaacaattgcggaagattcgcatttgtatacggtttatgcgattttagataagacttcgatcaactataagaataaacctgagtatgtagtgaataaaaccaagacagctgaaaagctggcacaggttttaccattgtctgcggaaaaaatttaccaatatttaacccccaaaaagaaggtctttcaggtacaatttgggacaggtggtagtggactgacattgcggcaaaagaaaaagattgaagcaatgaaattaccaggaattaagttcttggaaacaccatctagattgtatcccaatggtgtttttgcatcacatactgttggattggctcaaccaatttggaataaaaagactaatgcacaaaacttagtcggaactatgggaattgaagcctatttcaataagactttgactgggacagatggttaccggatttcttcggtagatgcatctgaatatcagcttccaaatagtaatcaggtttataagcctgctaaaaatggaaacaacttgtatttaacactagattctcagttgcagagtttgcttgagactcgcttaagtgaagtacagaaaacttaccgaccaacatcaattactgctacagttgaagacatgaagactgggaaaattttggcaacttctcaacgccctacttttaatcctcaaactatgaagggattaactaagtcgtatcgggatatcttggtccaagatacttatgaaccaggatcagttttcaagattttgtcattcgctgcagtagtcaacagtggcaattacaaccctaatgagtattaccggtctggttctgttaatattgctggttcgactatccatgactggctgacttcaggttggggcacaattccattttctcaagcttttgaacgttcaagtaacactggttttgttaagttagaacaaaagatgggtgctaagacttggaagaagtacttgaggaagttcagaattggtgaaaagacgggagtcagtcttccaggtgagcagccggggatgatttcgtttaaaacaccagttgaccaagcaattactgcttttggtcaaggcgttactgtgaatgtaatgcaaatgatgcaagcttatagttctttggctaataatggtcaaatggtaaagccacagttggttaataaaattactgactctgatggcaatacaattcaaggctatcagattaaaaaagttggtactccagtatatagtgctaaaaccagaaaagtaattgtggctaacatgagaaaggtacttaataagcaatcaggaactggttctgcttataagatgggaaacgccgatattgctgttaagacggggactgcgcagattgctaaccctaaaggtggaggttatctaaagggtgatagtaattatattttctctgttgttggtatttatccagcaagtaaaccacgttactgtatttatttgacaattaagcaaccacacttaattggaggcggagctgaaaagattttggcttcaattttcaaaccgatgatgcagagaatcatttcgattgctaaaaatgatgatgtatcaactactgtaaaagtaccaaacttaaaagctaaaaccgttgcacaagctgaaagtcaaactaagcaattaggacttaatttggttaaaattggtagcggtgatcggattagcaatcaaggagttaagagtggcgaaaagttagagtctgggtctaagatttttgtcaatacttcaggaaaaatcatttgtcctgatatgacgggatggacttatagtgatttacaccaatttgctagtttgacagatattaagttaagcataaaaggtaccggcactgttgcgagtcaaagcgtggctaaaggaacagaattaaaagctggaagaaaattaaacattaagttaaaggagtaactcagaatgaatatgatgttggcaagttgtattgccctagttagttcactggttttgacagtgatctttattccattgttgattaaatttatgcggtcacatcacgaaggacaagaaattcgtgatgaaggtcctaaatggcatcaaaaaaagtctggcacacctacaatgggtgggaccgtttttgtaattgcagcagttatttctgttatttgggtagctgctatgcagcacagcttgaataaagttgtttggattttggtaatcagtctcttaggctacggtattatcggtttccttgatgatggtattaagctttacttcaaacgtaatttaggcttgcgtgcatggcaaaaattagcattacagattataattgcaattttaattgtcttgattgctacaagtgatcattttcaatttgggttatatattccttttgctggggttgtccatagcttagttttatttgtggcatttattattttttggctggttggtttttcaaatgctgttaacttgtccgatggtcttgatggtttagcaacaggtttatcagttgtagcatatggtacatatgcctatatcgcattcaaacaaaagaattttgctgttttggccttttgtatgagtgtaattggtggtttaattgccttctttatttttaaccataagccggctaaaattttcatgggtgatgctggctcacttgctttaggtggcggtttagcaacaatcagtattatgcttaaccgtccctggtcattattgttagttgggattgtttttgtttgtgaaactgctagtgtaattttacaagtaatttctttccaaactacgggtaagcgtatttttaagatgacacctatccatcaccactttgaaatgttgggttggtcagaatggaaagtagatattgtcttctggttagttggattaattggcagtattttgtatttagtaatttggggataatcataaaatgaaggatattaaaacttataataataaaaacattttggttctaggcttgggtaaaagtggttttgctgttagcgaactccttttgcaattaggagcaaatttaactttaaatgataaagctgatttggagaaaaatgctaaggcacaagaattgaaaagtcgcggcgtgcgcgtaattggcggtcatcatccagttgatttgcttgaaaaagaacattttgattatttagttaaaaatccaggtattccctatgaaaatccgatggttcaaaaagctgaggagttgaatatcccgattattactgaaccagaagttgccttaagttgtagtgatgctccctatgtttgtgtgactggttcaaatggaaaaactactacggtaatgctgacacaaagaattttggaccatcatttgcaaaaatctggtcatcatgcttatgcagttggtaatattggcgtaccgatttctgaagttgtacctaaggcaactaaggatgatattttagtagttgaaatttctagtttccagcttttgggtgtaactgatattgatcctaaagttgcagcgatcgttgatatttacaacaacgtccacttagattatcacaagacttttgaaaattatgtcaatgcaaagttgaatgtaactagaacgcaaaacagtaatgattactttattgctaattatgatcaaaaagatattttggctaaggaaaaagaagtttcaccagctaaaatgcaaactttttctgagacagatcataatgctgattatttcattggcgatgaatatcttgaaagtcaaaacgaaaagattatgaagatttctgatattaaattaccaggtattcataatttgcaaaatagtttagtcgctattgcaatttctaaaattatgggcgctgataatgatgatatcgccgcagtattgagcacctttactggcgctaagcatcgtttgcaatatgtaacaacacttgatggctgcaaggtttataatgattctaagtcaactaatattgaagcagcaactgtagctattccatcatttaagcaaccggaagtattgattgctggtgggttagaccgtggcttcacttttgatgatttggtaccattatttaaaaaacatgttaagtcaattgttctttatggtgaaactagatatttgttagctgacgcagctagaaaagcaggaattaaggacattgtaattgttaatacactacaagaggccgttcctcgtgcttgggaattagttgaaccaggcgatgtactattgttctcaccagcatgtgcttcttgggatcaatttagaacatttgaagaacgtggcgattactttgttagatttgttgaggaattaaagactaaataaaatgagagttatttttacaggtggcggtacaggcggtcacatttacccaattatggcaattattgaacgtttgaaagaacgcggtattagtaaaaacgatgaaatcttatttgtaggtacacaaaaaggattggaatcaaaaattgttccagcagccggtgttaactttaaaacaattaagattcaaggctttaaccgtaaacatccgttaaaaaactttgagactatcaagctatttttacaagctactaaaagcgcacgccaaattttacgggactttaaaccagatgtcattttaggtacaggtggttacgttagcggtgctatggtttatgaagcagctaaaatgcatattccaacaatgattcatgaatctaattcagtggttggattagctaataaatttttgggtcattatgtggataaaatttgttatacatttgatgatgctgcaaaggaattctcagaaaagaagaaactagttaagacaggtaatccacggtcacaacaagttttaagcttgcacgaagaaaaaattgatcttgaaaaaacatggggattaaatccaaaaatgccaactgttttagtatttggtggatcccgtggagcattagcaattaacagaattatgcttaagtcattaatgatgctaaagcaaaaaccatatcaaattatttgggcaacaggtactttttattttgataaggtacaagaaaaaattaagaatgttgatattggtaataatattaaagttttgccatacattaaaaacatgccaggtctattgccagaaatgacttgtgttgtttcaagatctggtgcaacaagtattgcagaatttactgcattaggtgtacccgttattttgattccaagccctaatgtaactcataatcatcaaatgaagaatgcgcttgatttagaaaaagctggtgcagcattggttattccagaagatgatttaaatccaaataattttgtctcttcaattgaccatattttgctcgatgaaaagtatgctactgaaatgagcaaagcttctaaggctttaggcgtacctgatgcatctgatcaagtgattaaggtgatggaagaaatttcacgctaggaggtaggtgaggcagatggccaaaaagccagtaactaagattgatccaaggaaagaattgtctccgtacttgaatcatgaatttaaccaacaaaggaatagtcgaaaatcgcagaccaagatttctgcctcactctcaaatttacaggcagaaagacgacgatcattacgacgtaggctaggtctgataatgacggtttcagttttggcgatagctggtttaggatactatatttcacctttagcgaatatcagtactgttaaaataattggtgcagagcatttacctgctaaagaaattgttaaggtatccaagatcaaggctagcgataaagtttttgattacttgtttcaacaaaaagatttgagtcaaagattatcccaaaaatatccagaaattcaaagtgcacaagttcatttaggtcatattaatcaattgattttacaaattaatgaacgtaaaaccgtgggttacttaaaagatggttattcttaccgaaagattttggataatggaaaaataggtacgagagctctaccttggacaaaagtgaaccaagataaacctatttttgttggctataataaatcagatgagttaaaaaatgatttaaagttatttaacagtttacctaattcatttaaaaatcaggtaaaattattaagtgggaataccagacgaaattcacaaattattttagtaatgaaggacggtaatgtagtgattggcaatactgctactttgaatagcaaactaaaatattatgatactattagaattaaagctggtaaacatagccttattgatttagaaataggtgcatttagtagaccattaacttctagtgaaaagaaagcttatggcatatcgtagctgttttgcaagtttatttatgttagaattttttcaaggcaaatattaatgggggcttaattttggagaattcaaatcttttagtgggtttagatataggaaccacaagtgtaaaagccgttgttgcagattctggtaaggttatcggtgcagttacaacgccaaattcaggaatgcgacacggtcaaatagtagatattgatcaaactgctagtgcaattagtcgtgcattaaaaggtgtagcagaaaaaacaaacgccaagatttatagtgtagttacaggaattccggtagggatgttacaactggaaactgcaactggttttgctaatgttggtgaacaagggcaagaagtaaataatgatgatgtaaaaagaacgattagatctgcgattcattcagcagctaaggatgatcgtgaagcaattacatttttgccgagtcgctttttgattgatggtaaaactgaagttgatgatccaagaaaaatgattgcacgttccttgggtgttagtggaattttattaactgcacctactagtcctttgcacaatatcaagaaggctattgaaagagccggttatcataataatttctttgtgccaacgcctttagcaatttcaagtgtagcattgaatgaaagtgaaaaaacttttggttcggtaattatcgatcttggtggtggcgtaagtacggcaactgttattaaagatggccaaattaagtatgccaacatcgatttagaaggcggaagcgatattactaatgatatctctgctgttttaagtatttcgaaaaaggatgctgaacaaattaagttggactatggatttgcggatccacaatttgcctcaaaaaacgataaatttgctattaatagtgttggtgcaaatagtcagcaaatggttgacgaagtatatcttagtgaaattattaatgcacgcttagaacaaattttgactcgtttaggaaaaggtttagttaagcataatgcattgaagcaaccaggtggtattgtgattacaggtggtagtagcctattacaaggaattgatagtctgactgctaatgggttaaatgttaaggcccgaatttatgaaccagatcaaattggtatgcgtaatccgatttatacagctgcttatggtatcgtccactattcatataagatgtctgaagttgactatcttgttaatggcgtaatctatggttttggtgaacccgctgtggaagaccccgtttctcagccaaaaagtaccaagatttctaaaagtacgacttctaatagtgaaagtgaagctaaagaagcttataatagaagcaaaatgtctgccagaacagaatctgtgccagacgatgaaaataatactaagcaagaaaaaactaatagcttgaagagtttctttaagaaattctttgattaaaggtggttaatttaatggattttacattcgattcagacgacaataagaatgctgtcatcaaagtaattggtgttggtggtgccggcggcaatgctgttaaccgaatgattgacgatggcgtacaaggtgtttcttttattgcagcaaacactgatgttcaggctttgaacagcaacaaagctgaaaacaagattcaactagggcctaagttgacccgtgggttgggtgctggttcacatcctgaagtaggacaaaaagctgcagaagagagtgaacaaacgattgaagatgcacttaagggtgcagatatgatctttattactgctggtatgggtggcggtaccggtactggtgcggctcctgtagtggcaaaaattgcgcgtgagacgggcgcattaactgtaggcgtagttacacgtccattcagttttgaaggccctaagcgctctaaaaacgctgcagaaggtattactcagctaaagcaatatgttgatactttggttattatagctaacaatcgtttgcttgaaatggttgacaagaagactcctatgatggatgccttcaaggaagctgataatgtcttgaagcaaggtgttcaaggtatttctgatttgattacttcaactgactacgtaaacttggactttgctgatgtgaagactgtaatggaaaatcaaggtgcagctttaatgggaattggccgtgctagcggtgaaaatagaacagttgaagctactaagctggcgatttcttcaccattattagaagtttctattgatggtgctaagcaagtgttacttaacattactggtggacctgaccttacattatttgaggctcaagatgcttcagagattgtttctaaggctgctggtgacgatgtaaacattattttcggtacttcaattaatcctaacttgggcgatgaggtggtagtaactgtaatcgctactggaattgattctaaggctgaagaagctgcttctaagcaattaccaggtcgtagccaacaaattaaggctcaaccagttaaagaaaaagaagaagctcctaaggctgaagaacctaagcaaccagttgatcgaccacaaacagttcagcctgctgccgaaaaacaagaacctgagcagcctaagcaaacgatggttgatccaaccagtgtttggggactaaatgatagcgaagacaatcaaagaagaaatacccaacctactgagcctaagaaagattatgagggttttgatacttttagtgatgaagaccaggatagtatttctcaaattgaaactagcgctcaggacgatagtgatgataacagtgatattccattttttaaacatcgtagtgaaaactagttttggaggtagtataaatggcttttgataaattaggaagatttttcggaatttctaatgatgatgaattagaaaatgacgaagaatatgcctcacagactaaaaatgaaaatgaagacttgcctctgaactcagttaatcgcgataatgtggtttcaattaaatcaggcttgaattcggctaaaagcaagattgttttatatgaaccacgggtatattccgatgctaaggatgttgcacaaaatttattaaataataaagcagtagtgattaattttagcagaatggaagacagttcagcacgtcggattgttgatttcatcacgggtactgtatatgcattaaatggtgaaatccaacgtattggtgataaaatctttttagcaactccaccaaagtttgttactgatggcaaaattagtgatttagtggataagaaagacaatttaagctaatggttaatatattaaatttaatctacttggcactgacgtggattttatggctttatagtctgctgatcgtgattgatgcaattatgagttggctaccaatgctaagtaattctgttgttggtcgctttttagacaaggttgtaaatccatatttaaatttgtttcgaaaaggtccatttgcgagattagcttattcaactggaattgatgtctcgccaattattgctttatttatcttatatttcattcaaaactatgttttaagatggatatttgatattttattgaggatgatggtgtaatggaacgcagacaggcaagtaagttttacccacattttaatcaagaggaaagaccagtaattgactattttactggtctttttaatcagctgatttttaagcatgagccaattttgactgattttttggatccgggaaaacgagcaattttaagaacaattgttggtaatgatgcatttgttcaagagtatggtggctatcctaatgcagagaaaaagcgagtttatttaagtgaagaatggcttaatctgcgaccgagtgattatcagattcagccgtatgaaattgaatatccgcaaaaatttactaaaataaatcatagtgttattttaggcaccttggcgaattcgggtattgatacaagtatttttggcgatattattaatgataatcaaggaaaatggcagtttttcactaaaaaagaaatgacggaattttttgaagagcaaattgaccgcattggcagagcaaaagtaaagctgagaccgattagcttcaaagaagttttggttcctgaggatgattcgattgaaaaaacgaaaatagttgcctcaatgcgaattgatgctgtattatcgggtattagcagacaaagccgcggtcaaattcaaaagatgattaatagtcagctggttaaattaaattggcatgaaatagcagattctaatataatgattaaagaagacgatgtcttgagtttaagacactttggtcggattttgattgaggatgtttcgactacaagaaaaggtaaatataaggtggtgctcagactttggcagacaaagaaacacaattgaccccgatggatattcacaacaaggaatttaaacggcgtggtcgtaatggatatgatcgtcttgaagtagatagcttcttagatcagattgttgatgattatggtgatacacttgatcaagtggttgacttgaagaatgaagtagtttctttaaataaaaagttaactgatttacaagaaaaagtagatgattatcaagatcaagttaatgaatataacgaaaaaaagcgttctttaaataaatcattaatttcggcacaacaaactgctgatgaaattagagagaaagcagaagcagaggctaagcagattattgcggatgccaaaaagcaagcggaagataatattaacttccaaaagcatcaacaagatactatttctacggattatatgcgtgtaaaagagcaagttagtgaatttcgtagtaatattcaagaaatgctacagactgaaatcgataatttgaatgatgaaaagtggcaacatgcattggatgattacttcaacttagagcgttattatccagatgatggttcggagccagtaagtgctgatgatgaagacgttgaagatgaagatgttgacaatgatgatgaaaatgacgtaaactcttctcaaggccctgatgatttggagttggatcaaccggatgattctgacgatgcagataatgaagaaaatgctgcacctaaaccaatgaccggggacagtccaagtcatgaaacaattaatgttaagcctgaaatgaaatcagatcctttaggcccaacaattgtttttcctgacgactataaaaaataagcatattagattgacagtaaagcttgaaggcaattcagcgagctagtgatggtggaagactagcataagagcctaagagctgatcagctgcctaattaatctaaacggtatttgcacgttacgcaaagttaagtggaacttataataagttcaatttaggtggtaccacggttagcctcgtcctaattttaggatgaggctttcttttttagaaaggaattttgttaatgagaatcaaagatacccttaatttaggtaaaactaaatttaagatgcgcggtaatctacctgttcgtgaagctgaatggcaaaaagaatgggaagataacaagttatatgaacaaagattaaagttaaacgaaggtaagcctcgttttgatttacatgatggccctccatttgctaatggtaatattcatatgggacatgcgttgaacaagatttctaaagacatcattgttcgctacaagaatatgaacggttattatgcaccatatgtaccaggttgggatactcatggtcttccagttgaacaacaattagctaagcaaggcgttgaccgtaagacaatggatcgtgctaagtatcgcgagctttgtcgacaatatgctgaagaacaagttcaaaagcaaatggccgactttaagcgtctaggcgttatggcagattgggataatccatatattaccttgcaacatgactttgaagcacaagaaattcgcgtctttggagaaatgtataaaaaaggttatatttataagggcttgaagccagtttactggtcatggtcaagtgaatccactttagctgaagctgaagtagaataccatgatattaaatcacctagaatttatgttgcttttccaattaaagatggtaaaggtatcttagattcagatgtttcattagtaatttggactactactccttggactattccaagtaacgtgggtattaccgttaatccaagatttgactactccttagtagaagttgacggtaagaagtatgtaattggttcagatcgtttgccagccattgcagaagacttaggctggaaggactacaaagtacttaaacaattaaaaggtactgattttgatgggatgacttataagcatcccctttatggtaagactggtgtaggccaatatggtttggtaatgaatgacacctatgttactgatgatgacggtaccggcttagttcacaacgctactggttttggtgaagatgactaccgtgttggtcaaaagtatggtatcccggtcttcagtccaatggacgcacaaggtcgctttactaaagatattccagatccagatcttgtaggaatgttctatgatgatgctaacaaggtggtagcagataagcttaaaaaggctggcgctttgctcaagttaagcttctttactcactcatacccacatgattggcgtactaagaagcccgttgtcttcagagcaactactcaatggtttgcttcaatttctaagtttagagatcaaattctggatcaaattgaacaagctaactttattccttcatgggggaagactcgtctttacaacatgattaaagatcgtggcgactgggtaatttctcgtcagcgtgcttggggtgtaccattgccgatcttctatgcagaagacggtaccccaattgttactccagaaacgattgaccatattgccaagatctttgaaaaagaaggttcaaatgcttggtacactcatacagctaaggaactgttgccagaaggctttacttcagaacattcaccaaatggcgagtttactaaagaaaaagatattcttgatgtttggttcgactctggttcatcttggtcaggcgtaatggaaaaacgtgatggtttacactatccagctgatctttatcttgaaggtagtgaccaataccgtggttggttcaattcgagtttgattacgtctgttgcagtaactggtaaggcaccttataaagaagtattatcacaaggctttgtgcttgatgataagggacacaagatgtctaagtcacttggcaatgtaatttcaccaaacgatgtaattaagaagatgggtgctgaaattattcgtctttgggtagctcaagctgatactacttctgatgttgcagtctcaatgggaattttgcagcagtctgcagaaagttaccgtaagatcagaaataccttccgttacatgttggccaacactagtgattttgatccaaaagaaaatcgcgttgcttatgctgatcttcgttcagttgatcaatacatggaagtgaaattaaatgacttagttaaagactgtcttgctgcttacgacaagtttgattttactactgtcttcaagaaggtcttcaactttgtttctaatgatctttctgcattttatcttgattttgctaaggatgtactttacattgatggtgaaaacagccatgatcgtcgctcaatgcaaactgttatttacgacgctgctgttaaattggctaagatcttaacaccaattttgccacacactatggaagaaatctggggcttcttgaaagaacctgaagattacgttcaacttgctaatatgccagaagttgaagaatatgctaaccatgatgatttgcttgaaaattggggtaaattcatgaagttgcgtgatgacgtcttgaaggctctagaagatgcaagaaataagaagttaattggtaaatcgtttgaagcaacagtaactatttacccagataaggaaactaaggcaatgctccaagacttggatgctgatttcagacaaattctaattgtatctaagttaactattgctgatggtgaagcacctgataatgcaaagcaattgaataatgctagtgtagtagttgaacatgctgaaggcgaagtatgtcctcgttgtcggatgattagaactgatattggcgtagatccaaagttgccaatgctttgtggtcgttgtgctaaaatcgttgaagcagattacccagaagctgttcaagaaggatttgaaaactaatgcggttaggtactgtaaaacaatttgatgaaggcagtagctatggctttattgaagatgatcgtaatcataagtcatattttgtcttctataaagcaattaaagaggaaggctataaaactttgcaagtaggtcaaagagttaaatatcagttagctcaaggtaaaaatggtctgcaatgtgtaaatgtttatttagcctaaaaaggagctgggattttggatttaaaggaaacagaaatctcgtcacagcagatttttcaaggacgtattttggatctggctgttcgtacaattaagcttcctaatggtgaaactgcaactagagaagttattaagcataagcctgcatcggctgttattgcaattaatgatgaacaaaagatgttgttagtaaagcaatggcgggaaccaattaagcagattactttggaaattccagctggtttggttgattccactgatgcaagtccgcttgatgcaatgaagcgtgagctgaatgaagaaggtggctatcgcacagattactgggaaaaggtcagtgaattctattcttctcctggtttttgtgatgaaaagatgtatcttttctattgtgataccttaactaaattgactgataagcgggcactggatgcagatgaatttttaacttctagttggtatagcttagatgaattaaaaactttattggctgaaggaaaaattgttgatgcaaagacaatttatgcaattactgtttgggagaatatgatgttgcgtaatgctcagaccgataataaggattagttatggtagaaaaacgctctgattatcgtaaaaggcagaaaaaaagcctacttaataagctaaaatcttccttttctgataatgattcagaagaagtagatgtaaatcctgactttaagcgggatgactctgaagaagaacctagaagacgccctctggctggggatggacaagaattttatcagcataatcaatcgagtgataaggaaacgattcgccaagagaagtctttaagactgaaaaaaagattgaatcgtgctatcctgatagtgattgttttaattatattggtgctattagcactatttcatttatagtggaaatgaggaaataaattgaagattgcgattatcgtcccaatggcggaagaagctgaattttatcgtgatcatttccatgcagaaacaaaagaaatgttcggatcaacagaattcgaacatttttctgttaatggcaatgatgtatatttaggtttaagtggtatcggtaaagtgaatgccgctatgaatctgactagtttactaactaaagaaaaaattgatgtaatttttatgactggttctgctggatcattacaagatgatgttcatcgtaaagatgtgattttagtaaatgattttgcctatcacgatgctcactgtgttagtgccggtgaatatgtagaaggtcagattccaagagagcctgctacctttaagttgaattcgcctgaaagggaagcatttaagaaatatttaggtgaagaagacgtagattttaaggaagggcttgttgttactggagatacttttgttcaatcagaagaacaaaaagagttaatcaagaaaaactttccagaagctttaggagtagaaatggaaggagccgcttttgcacaagttgctcgtcattttaaaactccgttggttgctatgcgtgcaatttccgataatggggatgctaatgcagacaatgattttgacaagtttgtcaaggaagtcggcgctaaggcagctaagttaattagtgattatgtagaaaagatgaattaaacgtgcgtgaaatttatttagataatgcggcaacgacaccaatgtcacccaaggtaattgatattattaccgatgaaatgaaaaatgattttggtaatgcctctagtacctatgaattaggtcgtagggccagaaatgtaattgatcgagctcgtcaccagattgctcaagatattaatgctcaagatggagagattatttttacttcaggtggttcagaaagcaataatacagcgattcttggaactgcctatgctcgtaaaaatattggtaaaaagattattactacgccgatcgaacatccctcggttcttaatccaatgaaacgtttggaaaatgagggctacaacattgtctatttgaatgtcgatgaaaacgggcaaatttctttagaacagttaaaaaaggaattaacgccagacactattttagtatcgattatggccgttaacaatgaagttggtaccattatgccgctcaaagaaatcggggcaatggtaaaggactccaatgcatattttcatgttgacaatgttcagggaatgggcacaattaaaattgatgttaaggacatgaacattgattttctgtctgtttctgcacataaaattaatggacctaagtttttaggctttttatatgaaaatgcggatatcgatattccaaatttgattttaggcggtgagcaggaaaccaaacgtcgagctggaacagagaacgtaccaggaattgccggctttggcgaagctgtccgtgaagtatccgagattggtcgtgatgctttgcaaaagaaatatgctcattatcaagacattattttaaaggaattagacgatcatcaaattaattatgaaattaatggtgggtatggtccgggttactcacatcatgtgcttaatctgcatctcaatggtgtatctactacttctttacaaacaaatcttgatttgaatggatttgccgtgtcaggcggttcagcatgtactgctggttctttggagccatcacatgttttaattgcttgttttggagaaaattcaccaagaataaatgagtcgatccgaatttcatttgggcgttataatacggatgaagaaattgagcaattcgctcaagaattagtaaaaattgtacaaagaattcaatctaaaaataaatagttgctttcaaaaagaaagtatcttattataaataagtgaggaaaattatggcaaatacagttgtgattaatggtgataaacgtaagtttactttgaatcttgagttgaagctttatgctttgattgatgctggctttgtgaagacagctaagggtaattttaattatgaacatcctctttacaatgattcaccttataacgcgcctactaagttaaagatgaccattaataaggacttgtcgcatttaactatggttattactgatcgcaacggtttgcagaaggttaatatttttaaaaataagcaattagctcctactgtagaacttttagattatattttaaaggatcttgaggagcgtaagattttgcttgaagtaaaggattgattgaataatggttgacaatagcaagactagagtagttgtaggtatgagtggtggcgttgactcgtctgtttcagcacttttacttaaacaacaaggctacgatgttgttggtgtctttatgaagaattgggatgataccgatgattcaggcgtctgtacagctactgaagactatgaagatgtaaaaaaggttgccgataagattggtattccatattattcaattaattttgaaaaagagtattggcaccgcgtttttgaatatttcttggatgaatacaagaagggaagaacccctaatcctgatgtaatgtgcaatagtcagattaagttcaagtcgttcttggagtttgcgatggacttggatgctgactacattgcaatggggcactatgctaagactgttaaggataccaatggtgttactcatatgatgcgtcctaaggatggtaacaaggaccagacgtactttttgagccaattgagtcaagagcagattagtaaggttattttccctctagctaacctaactaagccacaagttagagagattgctttggctaatggtttagctaccgcgaagaaaaaagattctacaggtatctgctttattggtgagagaaactttagaaagtttttaagtgaattcttaccagctaaatcaggtaagatggtcactcctgatggtaaggtagttggtgagcatgctggtttaatgtactacaccattggtcaaagacagggcttgggcttgggctcaactaaggaatcaactgatccatggttcgtggtcggcaaggatcttaagaagaatgaattaattgtagagcagggctatgatagtccacttctatatgctagtcgcttgaatgcaagtgatatgtcattctttactggtaagccagatcatgattttgagatgcactgtactgcaaagttccgttatcgtcaatgtgatatcggcgtgactgttaagtatcatgccgcagacaatactgctgatgtttactttgatgagccagctcgtgcagttacaccaggtcaagcacttgttttatacaagggtgaagaatgtttaggtggcggtaatattgatgctgcttaccaagaagaaaagcaattacaattagtttaaaaaatatgcaaaaagagcgttcgatttttcgaacgcctttttctttgtgctaaactattcttattgattagacaattagggggatttaagcaatgcaaatttattttgttcgtcatggcaaaactgagtggaatttagctagtcgcttccaaggaggacatggagattcaccacttttgccacaaagcttagaagatataaaaaaattaggtcatcacttgcaaggaactaaatttagaggaatttttgccagtccgcttgatcgggcctttaataccgctcagggcatcgatgatgcaatgaacgctaacttacctgttgtgatcgatgaacgactcagagagtttaatttgggcgatatggagggaatgaagtttggggatgcagagaaaaaattccctaaacaaatggataatttttggcaccatccagataaatatgatccgactgaacttcatggtgaggattatccacatgttattgctcgtggaaaagcatttgctcaagaaatggcacaaagatttcctgacgatgatgataagattctagcagttagtcatggtgcggcattatcagctattatgggtggacttttaggctatccattgaaagatattcgcaaaaatggcggccttagcaatacctctttaactgtcttagaaacactagatggcggaaagacttttaaaccggtagtgtggaatgaaactagttatttaggacgtaaattatcgaagacggactcgttataatggatcaaaaaatagcgcaactttatgatgaaggtaaagtagaacaagccattcatcttttaatcaaaaaaatcgatcagcatccacaacaagttgctaattatttgcagctatcgacgtatttaattgagcaaggaagcttggatcaagcacagaagctattggagcaggcccagcatctggttaaagagccacaagaattaaattataatctggcagtgtgttattacatgcaaggcgattttgataaagcactggctttattagatcagatacctaatgatgacttaactctttatcaaaaggcactaacttacttaaaattagggcaaggccaaaaagctttagcttatgctttgacgatcaaaaaaattgatgagcgaattcaggaattgctaggcgatatttggttaagtttgggtgagaatcaacaggctcagcaaatgtatttggcaattcctgataataagaaaaatgcgaaagtttattttttactaggtgtcactacattagaaaaagatcgtgaccaggctcaaaaatattttgctcaagctaagcagatggatgctaagtattatcaacaagcaatgaatcagtatgcttcaattatgaagatgctaaatgacaaggaaaagaaaaattatgaatgaatttaccggtaaggttaacgggattgtttttgaaaatagtaaagacttgtataaaattcttgacgttgaaattatcggcactttatccgattattctcgtcccgatattaaggtgacagggaattttggcgatattcaaattaatagtagctatcgcttcgagggtaaactagtaatgcatgaaaaatttggcttgcagtttagagcaaataactataagcaagtattgccacatgaagagggatctttaactaagtatttgagttcgaataagttccctggaattggtaaaaaggctgcgactacgattattgatgaattagggctaaatgccttagatgtattgaaggaaagtccagctaagattgataagctttctttaactagaaagcaaaaggatagtcttttggcaggactaaatgcgatggattcttattcagaagtaattttaaaattggctaaatacggcattaataagcgtattgcaggacgggtttaccagctttatcatggtgaagcattagcaaaactagagaaagatccttatgcagcagttaatgatatttcgggttttgcatttaaaaccgcggatatgatgggaagccaattagatattgctagtgatgatccacgtagaattaaaggtgctgtttatcaagtattactcgatgctttaaatggtgagggagatacttatgtaggcttagctgagttattaacagaagcaagtaaattgcttcaaatcaatcaattcgacccaattgctagctgtattaatagtttacaagaagctggcaaagtaatagttgatggtgagaatgctgctctacaaaatatttatcaaacagaagttgatattgctcgcttgatgaaaaacttggtagaaaaaaaagaagataaaaaaagagaacaatatgatgataaaaaggtagagcaagcaatcaaggatgctgaaaaggaacttaagattcactacgacgatacacagaagttggccatcaaaaacgcagttaaccaaccgatttctattttgacaggtggaccaggtacaggtaaaactactatcattaatggaattttattagtattacgcaagctggctgagattccttcctccgctctttacagtgaagatcctccgtttttactagcagcaccgactggacgtgcagctaaaagaatgggtgaaattaccggaatcagtgctaaaacaattcaccgaatgttggggttaggtattggtgatactaacactcaggacttgaatgagttaaatggtgaaatcttaattgttgatgaaatgtcgatggttgacatgttcctttttaaacaacttttggcaagtattcatgatacgcggcatattgttttcgttggtgataaggatcagttaccttcggttggagctggcaatgtcttcagtgacctgattaaatcgcaagcgtttccaactactattttgaagcagattcatagacagggtgatgattcaacgattattactttggcgcatgatgttaatgagggtaaagatcagcaagcattgtttaagaaaacaaataattattcttttattagctgtcgtcccgaattagtaggggatgcagttggacaaattgttaaacttgctttaaaacgtggatttgcaaaagatgatattcaagtgcttagcgcgatgtatcttggcaatggtggtgtaactaatcttaataatgttattcaggcaattttaaacccatctcagcctaaaagtaaggtattagaagcacataatgaagttttccgaattggcgatcgtattctgcaattgcaaaataatcctgaaaaagatatttataatggacaaattggtaagatcattagcattgatgaagatgatgccaaggaatgcatgattgcagattttgatggaagagaagttgccttttctagaaaagatttaaatgatctgacccgggcttatgcaatcactattcataaatcacaaggttcagaatttccattggtgatcttgaatctaaccatgcagaattttgtgatgctaaaacgaaaccttttgtatactgcaataacgcgagctgagaaaaacttagtgttagttggtgatccacgggcatttgtggcagcttttaagacgccgggaaatgatcgtaagactggcttagcagcgaagatttgtcagcaattgggtattacaaaatcattggataaatctgatcaaagcaagcagcacgaaaaagctcaagaaatggagaatgaaaccgataaagcagaagtagcagaagattttgttctaacctcggaaaaaatatattctggtgaaattgatccaatgattggaatggaaaatatcaaattataaggataaaagccccttgaattgttaaaacaaggggctttttcattatacaaaatcatggtataattattgttgtctaaacatacgttccaaaatatggataattaacatggatattacaataattacactaacaataggcttattaacctattatttttttcaaaagcgaaaaaagaagaaaatgaaaaaaatagaattatctgtaacagataagaaagaaataactaaaattgaaaaaattgcaggcaaaagattaccataccgttttcctaatcataagaacttgacctttcagatcattgaattaatgcgaccgggttatattaagcgacgcatttttgacaataaaggccattgtcattatttgattaagtactatttagatcgttcagtggcggaattagttgaatttggtgagacggatggtcattattggcgtaagactagttggaatggagaaactaaggtaacttaccattatggcaaacatgaattcaatgagttagacgaaattacaaaaaatttgcgctattatggctcaatagtcaaagaaggtagaaacaaaattttgcctttggaaaatgacttaaatcagtatgtgaatgagttagaaaatcatgctagttatcaaaaagcttggattacacataaaaaagtaactgattcacaaactgttcatgatgctatgatagttgaaaaaactttgttgaataataaacgtgatttgaaacgagctttggctctgcaaaatgttttacgaattcgggcaattaattctggctataaggtttacaatcaaaaagtaaacgcatttcagaaaagaatgactgaactacatttgaatcaaataaaacatttgcgacctatgaatattttatctcaacgtgatttgcgccatcttagcaatctcttggcaggcgctgccgcagaagaattagtgaattctcgtttacgtgaagtgcagacagggaaagaaataattcataatttactgttaccatatccctatgaaaaaaagaatagtttagggagtaaccaaattgatcatgtgataattacgactagcgggattttttgcttggaaaccaaagcacgaacaagtaaaaatggacagtataatgtgcaggctgattatgatcagatagccgatcaagtggccaagcataaagaaagtattaaatatgtcctagaaaaaagcaacaacccagtgattattaatttattgagacgcttgccaaatatagatcaattaatcagaaacgtggttgtatttgtaagtagaacagatgatgagttcacattgactgattcgaaccgttatcaaaaaatggaaatagatgttgtgcaattggcagatattcagtcgttattagtcaaagctaaaactggaattggattacagccagacgaaattgcagctatcaaagaagaaatggacaatagtaaacaattgcaagaagaaaaaaattatcaagaaaatgttctattttttgaagatcaggagtcaacgttaactcaaaagcaggtggaagagcaattgtatcatgctaatcaggtgattaaacatatcgatcagattaatggacttcttggtaattacttgcaggaagcacgggagtggcaaaagcagtatcaaaaataccgttattggaagaaattttatgatcaagtacatgatttcgttgatcaggaccaatattatcaaaatcataattcgaaaagagatattttagataagatataaaaaaggaagaatttggaattcttccttattttaataaattaaaatgatcaactttaaatgttactttgaagggctgcttttcaatatcttcaccatcaatttgagcatattcacttttattggtttgaactaggatttctttagcttcaatataatgaaattctggtgcattaacgtgtgaaccatctttgatcagcttaccaaaaagccagagaaacttgcgtaaactcggtttttcaacaattactgtatcaagatggtgactgtaaatgtccgcttttggcaaaatagcaaaaccaccgccaaagtagggatggttagtagtagtgacaaagtatgcatctccgtaacgaagagtttcgtttttagttttaacagtcactgtaaaggtatcctgcttaattagtgccttgattatatttaggccataaatcatatttccagaattgaggtgattgaggtgtttttttaattgctcatgattactctgatgaacaacaaaggcatcaaaaccaataccgaaattattaacaaagtaacccttaggaatttgtttaatatttgatgtgaaaaaaccacaatcaacttgttccggttcaggatctcggagcaaattgttgattaattgcctgggatctgcggttaatccagcaccacgggcaaaatcgttgcctgttcctgcaggcaaataagtaatagctgtctcaggataattagaagtctttattccatttaaaacttcattaaaggagccatctccaccaactacgattaaaacatgttcagaagagagatgtaaattagcgtaattttgtgctagaacgactaattctccaggataatgacttttttgtcgcttaaaaggaatattcatttacgcgtggtgctagttaaatcgttttagttaataaaaaagtccaatcttgttagactcgacttgtaaatagtaataatagaaaagagtctgatctgattgaactgccttaagcttaagcgttttagccaccatttacaagttagttttaaagatttagtgataatttgtcggcactggtatcgtttgtatgcaccggctgagtttactcatcggcgaaatattgatcaaattaaaactacggacagtctgattttggctttacttatctggcaagctaagacaggaattgaatcacaaagaagattctgtgaatgtttcaattgtttatcacactcacgttttaatcggcgttcacgtcagctattgcaattgatttatcagatacggcaagaaatgaataaaaaggttgacctgaatggacagttcttgatcattgacagctttccggtacctgtttgccaaccaattcgaaactatcgtgctaaaatttttcgcggttatgccaacattggttataaggccaccaagaaaatttacttctatggtttcaaagttcatgccattgttagcgatgacggttacattcttgattatgtcgtaacaaaggcatcagttcatgatgccagggagacagttgaactgatagaaaatacccatccatctaattactatcttcttggcgacgaaggctatttaggcaaagaactgcatcaacagctaaaacaaatgggttacgaactttggacaccatatcgtaaaaatatgacaggagctaaaaagcacaatgatcatcaattgatggctattcgcagaacaattgaaagcgacttttcgcttctgacctattacaatgccgagaacaatcgagcacgtagtctgataggctttcaaagccggttggaaattgcaattttagcttataatttggcttattgtctagaacgatttaactagcaccacgcgtattcatttcttttagtatatcttgtaattctttatcagctttaatagcattgccattcccagcgacctcattaactaataactgaactttaatttttttatgcatattattcattttctaaaataaaagactccctaaggagtcttttttactatttcttttcgataatgattggtaaaatcataggccgtcgttcagtcttggaatacaagaagtctgaaagattttcggtgatcgcctttttaatgtcactttcttttggtctatttgatttagccatttcatttctaagcacatgataaacatgcttttgcgcttgactaattaactcagttgattcacgcatgtagacaaatccgcgactgagaatatcaggaccagctaagactcgcttgtgcttataatcaactgtagcaactgcaacaactaaaccttcttcagaaagaatttgacgatcatgaacaacaacgttgccaacatctgcagtaccagaagtatcaacgtaaacgtcacctgcaggaatatgtcctgtgattctagcgccatcagggccaaagcagacaacttcaccattagataaaacaaaagtgttttcagcgggtacaccggcttgttgagcaagctgggtgtgaataacctgcattctgtactcaccatgaacaggaatcatgtacttaggcttaactaagcgaaccatcatctttaactcttcttggccgccgtgtccggaagtatgaacgttatttactcttccgtgaataacatcggctccgccttccattaacttattaattaagtggttaacacttaatgtgttacctggaattgggttagaggagaagatgactgtatcaccaggttgtaagctgatttgacggtgagtaccattagcaattcgcgataaagcggctaatggttcaccttgagaaccagtacataaaatcattactttttcaggtggtagtttgttgatctcatctgcgtcaacaattagatccttaggcaaatttaagtagcccaagtcgaccccattatcaacgccattttccatactacgtccaaaaattgcaacctttctaccggtatcaattgcagcttgaatagcagttgatacacgataaagattagatgcaaaagtggcaaaaataattctaccgtggattccagtgatgatattatgtagtgacttagctacaaatcgttcagacttagtaaattgtgttacttcagcattagttgaatctgagagaagagcaagtacaccttcattgcctaattgagccatcttttgaaaatctggtgcaggttgatccattactggtgttaagtcaaacttaaagtcaccagtaaagacaacggcaccgagtggtgtatgaacggcaatacctaaagtatcaggaatagagtgagtagttctaaagaaagaaacggaaagtttcttaaacttcaaaacagtatcctcatgctcttcgtgtagttcagttgtctttaaaattccgtgttcttccaatttgcctctaattaatgaaagggcaaatggtgtcgcatagacaggaatttcaggaattttttctaacaaaaatggaataccaccgatatggtcttcatgtccgtgactaaccacaagagctttgattttcttacgattcttgattaggtaagaatagtctgaaataacgtaattaatacctaataggttatcttcggggaatttaataccacagtccatgatgataatttcatcctgatactgaacacaatacatatttttgccgatttcatgcaaccccccgattgcataaacggctacttcattatttttaattcgcactctttattacttcttgtcgaacgttgttaacttaaagtcagcatgttctttttcgtaagttaacgaattaccagttaattcttggatgagttcaatgttatagggggtactgtcctcaaccatacttcttgcttcgaccatgttgtctgcttccatataaagagtttgtgtagtttctctacgaggattgacaatcttgtctttttgatacaaaactttgtaaatcataaatgattctccttattaatgtagagtaaaaattactcaatagctataaaaattttatcataattataaagttaagtatataattatgtttcttttgatttttaccgattaaatttggtcaatgttattgacgtaaaataacatcagttgtacgataatcatgtagtaaatgattaataaattcatttgctcgttataagaagtctcttcaatcttcttaattcccaatgtatgagtcactggcctagttaaccagtgactttttttatacaaaaaagcctgcatctgcaggcttttgttttggttaaataacaattaagaaattacgactgtatcttctttaagtgcgaatggatcctgcttattaatgcggtcatagaacaagtgaccatttaagtgatcaatttcatgagaagaaacaattgctgggtaatcctttaagcgaatggttttttcttcaccgtcaacggtggagtaatgaatggttaatttatcagggcggggaacgtaaccattaataacttcatcaacactaaggcaaccttcaccttcgctaagacaagcttgacgaacagattcagagacaatctctgggttaacataaacttctttaaagataattttgccttgatcatcaggaactaaaagtgcagccatttgtacaccttcacctacttgaggtgcggctaggccaacgcctgctcttaattggtgcttttcagcaatcttaggatcttgtgaatcaattaagtattgcatcatatcatcagctaattttttatagtgatcactaaatggaaatgttaaaggcttggcaacttgacgtaagacgggatcaccgtcacgtacgatatctttcattaagatcaaaataattactcctttttaaaaattattatctacattatatttttaccatagtttaatagtttttgcttgtttttgcataaaaaaatccagggttaacttgattgttaagcgttgacccgtatgcagttaggtggtaaaattcactaacgtaactatacagatttaagaaaagcacttcgataaggcgctaatgcgttaccgaaactgtgacagagtcacagtttttttattgaagagtggggaggaatacttttgtcagaaaaaagaagagacgatctaagaaacattgcgatcattgcccacgttgaccacggtaagactaccttggttaaccaattattgaagcaatctgatactttgccagaacacatgaatctggaagatcgtgctatggactcaaatgccattgaacgtgaacgcggtattactattttgtctaagaacactgctgttaagtataaggatactactatcaacatcttggatacaccaggtcacgctgactttggtggggaagtagaacgtgttatgcacatggttgacggtgcattgcttttggttgatgcctatgaaggtccaatgccacagactcgtttcgttttaaagaaagctttggaagctggcgtaaaacctatcgttgttttaaacaagattgaccgtccaggcgctcgtcctaagaaggttttggatgatgtacttgaacttttcatcgaattaggtgccaacgatgaacagcttgacttcccagttgtttatgcatcagctttgaatggtacttcatcatatgatccagatccaagtactcaaaaggaaactatggatccaatctttgataccattattaagaatattcctgctccagtagacaactctgatgagccattacaattccaaatcaccatgcttgattgggatgactatgttggtcgtatcggtgttggtagaatttaccgtggtaaggttaaagttagtgacaacatcactgttatgaagcgtgatggttcaactcaaaacttccgtgttactaagttatttggttactttggcttgaaacgtaacgaaattaaggaagctaaggctggagatattattgccattagtggtattaatgatatctacgtgggtgaaactattgcatcagctgaacatccagaagcattgccacttcttaagattgatccaccaactcttcaaatggactttgttgccaacgattcaccatttgcaggtcgtgaaggtgatcaagtaactcctaagaagcttgaagatcgtttgattcgtcaaactcgtaccgatgtttctttgaaggttgaaccaactgatcaattgaacgcttggactgtttcaggtcgtggtgaacttcacctttcaattttggttgaagaacttcgtcgtgaaggcttcgaattacaactttcacgtcctaaggttatttaccgtgaaattgatggtactatgtgcgaaccatttgaatcagtacaaatcgatactccagatgaatatgttggttctgttattgactcactttcacaaagaaaaggtgagatgaagaatatggaatcaactggtaatggtcaaactcgtcttgaatttttagttccatcacgtggtttgattggttacaataatgaattcatgtcacaaactggtggatatggtatcatgaaccacacctttgaagcatataagccagtagtaaagaactggaacccaggtcgtcgtaatggtgcattggtatccattaaccaaggtcaatcaactacttactcacttcaatcagtagaacaacgtggtgagttattcatcggtgctggtgttgaagtttacgaaggtatgattgttggacaatcatcacgtgaacgtgatattgctgttaacgtaactaagggtaagaacttaactaacactcgtgctgccggtaaggaccacgctgctgctattaagactcctagaacgttgactcttgaagaagctatcgaattcttaaatgatgatgaatattgtgaagtaactcccgaatctattcgtttacgtaagaagattttgaacacttcagaacgtcaaaaggctgataagaagcgtaaccgtgctaactaagatagtttaataaattttaaaaggtcgtcacttgatagaagtgatgatctttttgttttataatgaaaaaagtattatttagataaaggggcaacgcttgtgcgtcgaaaattacgttatcttaattaccagatttttattccctatcttattttagtagtggttgggataattttggtatattcagctagttcagatattttattagttaatggatttaagccaaatgtctatgggatacggcaagcaatctatgctatagtagctttctttttgttggggattccgttttttgcattaagaatcaaagtatttaaaaatccaaagtttgtagggggatttttattaatttgtatacttatgttaggatggctagtatttctacgttttgctcatggcagtagtgcggcagttaatggtgctgtaggttggattaacttgggctttatcaatttgcagccactagaagttactaaattggctctggtcatttatttgtcatatgtactagacagaagagatggaaaattagtcaagggtaagatcaaacataatttgtcacacccagcaattttggcggcttttttaatgtgtttggttattgttgaacctgattttggtgggacagcaattttatttatgatcactttagtaatgttttcagtatcaggggttccaactaaattagctttaacttggttagctgggattgtgatcttagtgacagctgtattttttattgtagttgcctggaatcctggatttttacaaagaagttatcaattccaacgactaatgtcgttcttgcatccctttgaattagagcaaaaaggtggggcccagctagttaactcctattatgcaatccacaatgggggattatttggcgtaggactaggtaatagtatgcaaaagcgaggttacttaccagagccgtataccgactttattttatccattacagcagaagaagtaggtgtgattctgacaattttattggttggattactcttttatttgatgtggcagattatggaagttggggttcacgcggtttctcaattcgacgcattaatttgctttggcgtgacgactattatttttacagaagcattctttaatatcggtgcagtactaggattgttgccgattacgggggttacgctgccatttatttcatatggtggttcatcaatgattgtcttgactgctgcgattggtttagtactgaacgtttcagcaaatgaaaaaatgttacaggaaaaggatgaaacagttgcatgagtatcaataaagaaattgaaagtacccacttaattaaaagggtagcattgattatttatttaaaatcagttagtgatcaatataagttgcgccattttggtgacattgtttatttttctaaaaaaatgaaatattgtgttctttatgttaatcgcaacgaatgcaatgaaatcaaaggacaaattgctcatttggattttgttaatcatgtcgaaatttcagctgaagaagaagtaaatttggatagccaacatattgaaaatcaattagctgagatggcccaaaaagcagaaaagaaattgcaacttgaacaagaaaaaagtgagaatcaactaaaatgagaattatttcagggaaatatgctaaaagaaatttatttactttgaaaagtaatcggacaagaccaaccagtgataaggtgaaagaatccctttttaattcattgggacaattttttcagggtggtaatgttttagacttatatgctggtagtggtgccttaggaattgaagctgtttcaaggggctgtgaccatgcgagtctggttgatattaatcatgctgcttgtacaattattaagaaaaatgttgctttaactaaggaagagcagcgttttaatgtttataatatgcgcagctctgcagcattaaaattattttctgagaatgatgaaaagtttgatctagtttttcttgatccgccctatgccaaagaaaaaatcgctaaggacatgttgcagatggtaaagtcgaacctacttaatgatcatgcaattgtggtagcagaaactgatgatcatacagaactgggtgaaattactggtttttcattgatcaaagaacaccatttaggaaaaacaattgtgaggatttatcgaaaggactaataatgacaatcgctttatttccagggagttttgatccgattactaatgggcatgtggagaccgctaaaaaggctgctgaaatttttgataaagtatatgtagttgcgatgaccaatacagctaagaaatacttgtttacgcctgaagaacgtgctgatctaatcagggatgcactaagggaaatacctaatattgaagtgctagaaagaccggaagaagtaactgtaaatttagcacatgaattgcatgctaaagttatggtgcgcggtgtacgcaacagtgctgatttccgctatgaacaggagattgctgggattaataaaaaattggctccagatgtgaatacagttttgctttttacgagtccagaaaattcttttgtagcttcaagcatgattaaggaattagctcgttttgatgaagatgttagtctgtttttacctaaaaaagcagcgattgcattgagagagaagctaaaacatgaataataagaaaaacaatcaatcgaaaaagcacttgcgtaattggctcttggcactaattgcgcttgttttattagtggtacttgctgtttggccgaccgattattatattgaatatcctggtgaggcaatgcccgtgggccagtttattaagtcatcaaataaacgtccgaataatttttatttggtgacagttagcataactagtcggccggctccggttttgcaatatctatggagttttactcgtccgtatgatgagcgtgtatcaagcaaggagctgctaggaggtcaaactagtgctcaatataatgagttgcaaaactggtatatggaaacaagtcagcagaatgcaatttattatgcagctaaaaaagcaggtaaccagcatagcttaaaatatctaggcgtttatgtaatggaagtccagaaaaattctagttttaaaaataagctccaaattggtgataccgttttaggcgcaaacgggcatcgtttcagctcaactgaagagatgatggattatttgcgtaaacaaaagattggtgcacgagtaacaatctcagttttgcgtggtaagcaagagaaacactttactggcaaaattgttaaagtaaagggtactaataagccaggaattgggattcaattagttgagcatgtagttgtgaaaactaagcctaagttaaaaattaatgctggcgaaatcggtggcccctcagccggattgatgtttacacttgaaagctatgaggtctttaccaagcagaacttaagtaagggacataagattgcgggaacaggtacgatttcacctaccggaaaagtaggaatcattggtggtgttgataaaaaagtggtagctgctagcagagaaggtgcagaggtcttctttgcgccgactgattcaaccagtgtgaagaaaagtgaaactaattatgcggttgctaagagaaccgcaaagaaaattcacaccaaaatgaaaattgtccctgtgagcacttttgatgatgcattaaactatctaaagacacactactaaaaaaattcaaaaaatttgaagtctagaaaaaattctgggctttttttgcgtaataaatagtagaggtgatttttatgaattttgaaaaagtaaaagaatttgtgcttgagaaaaaagcatatctcattggtgcaataattcttgtagttggattttatggattgaagaaaggggatcatcaagaaaatgctgctgcagtgcaggatcaagttatgcagtctagcactagtagttcaggtgcaaccactaatactaatgcagtgactagcagtagttcaacaaccgtttctaagactgtaacttgtgatatttccggtgcggtgaagcatcagggagtatatacattgaaaaatggtgctcgtctgcaggagttaattgaggcggctggaggtactactgctagagcacaattaaaagctattaaccgcgctactttgcttaaggatcaagataaaattcatattccttacaagggtgaaaaggttgaaaatgtggcaactgcaggatcagctgataatagtcaaaatagtgggagtactagtagcagtagcccaagtaatcaaggggatggcactaagatcaacttaaatactgctaatgtaacggaactacaaaagttaactggaattggtcaaaaaaaggcagaacagattattgcttatcgtgaacaaaatggttcttttaaaaagatagaagatttaatgcaggtatcaggaataggagaaaaaacttttgcgagccttaaagatcaattggctgtttaaaaatgaagttggcttttacttaataaccgctttgttgctaattacaatctcttttttggctttttcttgtacaacaatggtgcaaaaaatagtagctttattttttctgggttactttttgctactgttagtacaaaaatatcgagttagtttaaaaatagttagtctaatagttggagcatttctattactgatttttttaagtaaaccaaaaaccaattttgttttaacccagcagagccaattaagaatttaccctgatcaggtaagaattaaagacgactacttaacaggtgtgggtaatttcgctcaaggtaaaattttaattggtggcaaggtaacagatgttcaaaaagaactgcttaagcatgggaaccctattttagtgacagaaattaatggggaatgcaattcaattgagccagcaactaatattggtgagtttaattttcagaattattatcaggcaaaacagatttaccaaaaattgaaatacagtagttgtcaaatgaagctattatcgattactgattttggggatcaattgcatcaattacgttttgaattgcagaactattttgccaagatgccacagttattaggctttttcgctagtgaattaatcttgggtgaaaataatgctcaagaaaatcaagaaatactaaataattatcgagatttgggtgttattcacttgttaagcatttcaggcttacatgttggaatctatgtcttgttaattagtgtattttgttttaacttgaaactgacggatgaagaaacttttgtctgctgtacattggttttattgctaggtatttttctaagcaatggtcaagccggctttgtaagagctagtttaacctactttttaggcaaaatttgtaagtttaagaaatatcatgttgcgtcgatagatctgctgggattgacctgcattttacatcttttagtagtaccgcgtttatttctggcaactggagccttattgagctatattttggcattgggtttacagttaactgataagtttggcagttttaaacaagcaattttgttaaatattttattaacgccattactattgcttttcttttatcaggtcaattttttaactgtaatttttaatatgttagtagtgccatatttcaattggatagttttaccaattgcttttttcaatattgtgacgtttggtctgactaaagattttgctccggtattagaaaaagtgcttgaattaggtgagaaaatcattgggcaattatctgctactaagttgggactactaacttttgggcaaattaattggtggcagtgtctgttgctattaatagtaacgattattttaattgtttctttaagagaaaaagttaactggcgctttaatagtaagaaaattatggtgggcttgttgagcttgtatgtaattttcttcagcatgattcattttcctttgcgagggcaagtaaccttcattgatgtgggccaaggagatagtattctagtgactacgccatttcctcgcaaggtatatttaattgatactggtgggaaactaaactttagtggcaaaaagcagacacctcagattgatcgaattactattccatttttgaaaagtcagggaattaatacaattgatggagtctttgtttcgcatcaagatgccgatcacgttggtgatttaggaccattactagagcaggttaatgttaagaaattatttatggccgaaggactaattaagaatccatcttttcaaaagagattagatggtcgtgtaaaagataccaaattattggagttacttgcaggaatgcgggtgaaagaaccgcagattacatttaatgtggtttatccatatcaagcaggagaaggaaagaatgaagattccctgagtttgctttttagagtagcgaataagaattggttgtttacaggagatttaggtcaagatggtgaaaaggaaattatgcagaggatgaaacttcaggtagattattttaaattgggtcatcatggcagtaaaacatcatccaatccagactttttacgtgcaatccatcctaagcaagtttttatttctgctggtcgaaaaaataggttcgggcacccccatcaagagacgctaacgacactaactcaacagcaaataccatgggtttcaacgcaagactgtggtatgattagctggtattatggcggactgcaaagtcctagatttagttactttttaaagcgggataaaaaatgaccttactttctttgtttaaaaatacaaataacaataatccacataccttaatttggggtgcagatgactttctcaatgattacttggtgagatcatatgccaaggaagatcgctttaaagatttggagcacgtgactgtcgattgcgaaagcgatggcttagatgaattgattgcgagcttaactgaatccagtttatttagtgaacagaaatttattgtagtcaaaaatcctttctttttaacagctaaggtatctaaaaaattacagaaacaaattgatgacttacaaaagatttttgaaaacttagctgatttagaagatgtagtagtaattgttgcttcttatgaaaaaattgataggcgtaaaaaactgactaaaactgttctaaagcaattcaatgtggttgagccacaaattaggccctatgaagttgcttcaacgactaaagccttgatcaaagatgagggatatataatcacacagtcagctttacagctgctaattgagcggagtgatcaggtaattgacactattttaagcaattatcaaaagctaaaaatggtagctaccgataacaaaattactgaaaaatcagtaatgcaaaatgtagatttgtccctagcacaaaatattttcgctattttggagtcggctttagataagaattaccgtgaagcagttgagcgcttagataatcaattacgtgaagggactaatccaattcaattattagcggtctttgaaaatcaattagaattgattttggtcgttaagatcttagcacaaagaggtcgtagcgaaccacaaattgtaaaagaattaggcgttcatccctatagggttaagttagccctacgtaatcggttgaagatagacaagctagaaaatttattaagggatgcaatcgacttagaatttaaatataaaaatggaacttaccgagaagataattttttgaaattatttatcttaaatgtctaagagtatacaaaaagaggagatcactgcagatctcctctttttattattagtaataagtaagatttacttgtttgctaacttgtttaaacgactcttgtcacgagcagccttgttcttgtggattaagccttttgaagcagccttatccaaagcacgttcagcttctaaatgcaacttggagacgtcttccttactatcactttcaacagcgttcttaaacttcttgatagcagttcttaacttgcttaattcagaagcgcggcgttcgttagtagcattttgagccttaacacgtttgatagctgatttgatttgtggcatgaaattcacctccaatgatttagaaatttacttcatccattatacttaagaaatatcacggatgcaaggtaatttctgcttgcttttttaaaaaataatgtgtatgattatgactgttgtgaaccgctaacgctgtttatttgttcacgccgacgataaacgttgttaacggcaattatttaatgaaaggtgaatttaactatggcaatttcaaagactgaaaaagaaaagattatgaaggaatacgcaactcacgaaggtgacactggttctgttgaagttcaagttgctcttttgactgctgatatcaacaacttgactgatcacatgaagagtcacaagcatgaccaccactcatacgttggtttgcttaagaagatcggtcaccgtcgtaacttgcttcgttaccttgaaaacaacgacattaaccgttaccgtgaattgatcaagaagttaggtcttcgtcgttaattttcacataatattgaataatgaagctagccgaaaaggctggctttttttgtctctgtcataattttattctttatgctaaaattgaaacagattatttttacgttgagatcgatagatccataagaattaaaaattagatagaaaaggaaatataatggctgatcaaatcaaaattatgatcttgagcggtgtgcgtgaacaaggtaaagacatgtttgccgttcaagttaatgatgaaatttttgttcttgatgccggattaaagtaccctgatagttctttatttggtatcgatgtagtaattcctgaccttgatttctttgaacaatacggagatcgagtagcaggtatctttttaacacatgggcatgctgattcaattggtgcattgccatacattttgcgtaaatacgatattccagtatttggttcacaattgagtatcgaacttgctaaaattgaagtacaacgcgaaaacaaacgccgtaagaatagtttgttccacgtaatcgatgcagatactgaaattgattttaagaatgcaagtatttcattcttccatacgacacactcaattcctgattcacttggaatagatgtacatacaccagcaggtgaaattgtttatactggtgactttaaatttgatccaacagctgcgttaaattatcggactgatatggatcgcttagctgaaattgaacaaaagggcgttttagcgcttttaagtgattcatctaatgcagaagcatctttccctaatgcatctgaacaagatattggtaaatttgtgactaatgtcttcagaaatgctaaaggcagaattatcgtagctgctaaagcctctaacttgaatcgtgttcaagaagttttaaatgctgcagcagcaacagggaaacgcgtcttattaactggccgcgatctagctaagattgttagaacttcaatgaaattaggctatttagatgtgcctgaaggcttgttgatgcgagttaaggatctgaagactgtgccagatgagcagacagttatattagagactgggcgtatgggtgaaccacttaactcattacaaaaaatggctaagaagcgtcatagtatgattacgattcataagggcgatttggtctttattgcaactactccgtcacatgcggttgaaacgatggtagctgaaaccagtgatttggtatataaggctggcggtacggttatccagttaggcagaaatatacatactagtgggcatgcaactggtcgtgatctgcaacttttgattacaaccttgaagccaaaattcttaattccagtaattggtgaatatcgtttacttgaagtagtacgtgatttggctattaaagctggaatgaatcctaaagatatttatattaccaagaatggtgactgtcttgaatatgactttaagcagaagcgtttcttcttaactgacccagtaccaggtgaagataccatgatcgacggttctggtgttggtgatgttggtaatattgtgctacgtgatcgtgaggtcctatcagatgacggaatctttattgcggttgttacaattgaccgtaagaagaaaaagattattgcagagccaaaagtcactagtcgtggtttcgtctatatcaaggctaatcgccagttgatgagtgattcaattgatgtaattaaaaaagcaattcaggccaattttgaacacaaaaagtttgattggactgaattgaagcaagatatccgcggtgatttggagaagtttttatacaagaaaactaaccgtcgtccagtgatcttgcccgtggtcatggaagtaaatcaaaaccgtcatcgtgctatgcagaaacgcaatgaaaaagcacaaaatgacaataagaaccatgccaaagacgaaaataaaaaaataaataagaaaaaagaaagtaataagaaagactaaaaatgacatcagtaagccaacaaaatttattgaaacttgctgaagaagatgagcgtaagggagatctcgaagcagctattcaaaatctagaagaagcattacgtgaagagcattcattggacgttattttgaaactctgcaaactctattgcgctaataaacaagaagatcaggcatatgctttaattaaagaggagcctgatcttttttctgatcagcgagtatttaaaagttactgtcaaattctagctaaaaataatttttttattgaagctctacaactaaaaaatcttgttggggtggacttatcagaaaaggtaaaaccagcttctgaagaaaaacagcggcagattatgcaaaactttaaacaacgagaacaggttactcagtcggattatgaaagtttacataagttaaacctgcctaattttaaagcttttgcacgaagcgtcttattagatccaacgccagattttgctgttaggttgtcactttgtgaagacttagttcgcttgggacttgaagaaaagtttgaaatttgggtaataggccagatggagagctttattccggcgaatacactgcttctagaaaaagaacctaagtaccgtgaaattatttctagcattggaagcaaatttcacaatagtccaagtcagttgccattaatgctgggagaagtgaatttggtattaggcagtctttaccctaaaattaaccaatatattgatgagcctgacagttttgctagtgatttagtctcatttttacaaagaaaagatggccgtagtcatcaaaaattactagaaaaaatatataaatacttaccgcaataaaaaataagtaaaaaaggtttacattttcaaactatttagtataattagcaaaggatattttcgttaggcaatttcgcttaagcttttttactaggcatttgccgaagaaagtagtacaatattcaacagagaattatccgttaacttatctcaacggacttcttgcaaatttacaggagggtcattttaatggcagaaaaagaacattacgttagaactaagccacacgtaaacattggtactatcggtcacgttgaccacggtaagaccactttaactgcggctattactactgttttggctgacaagggtttggctaaggctgaagattactcacaaatcgatgctgcaccagaagaaaaggaacgtggtattactattaataccgcccacgtagaatacgaaactgaaaatcgtcactacgctcacatggacgctccaggccacgccgactacatcaagaacatgattaccggtgctgcacaaatggatggtgctatcttagttgttgctgcaactgatggtcctatgccacaaactcgtgaacacattttgcttgctcgtcaagttggtgttaactacatcgttgttttcttaaacaagtgtgatttagttgacgacccagaattgatcgacttagttgaaatggaagttcgtgacttgttgactgaatacgattaccctggtgacgatattccagttgttcgtggttcagctttgaaggctttacaaggcgacaaggaagctcaagaacaaattcttaagttgatggacatcgttgacgaatacatcccaactccagaacgtcaaactgacaagccattcttaatgccagttgaagacgtatttactatcactggtcgtggtactgttgcttcaggtcgtattgaccgtggtactgttaaggtcggtgacgaagttgaaatcgttggtttggtagacaaggttcttaagtcagttgttactggtttggaaatgttccacaagactcttgacttaggtgaagccggcgataacgttggtgtattgcttcgtggtattgaccgtgaccaagttgttcgtggtcaagtattggctgctccaggctcaattcaaacccacaaggaattcaagggtcaagtttatatcttgaagaaggaagaaggcggccgtcacaccccattcttctcagactaccgtccacaattctacttccacaccactgatattactggtgaaattgaattgccagaaggtactgaaatggttatgcctggtgataacactgaatttactgttaagttaatcaagccagctgccatcgaaaagggtactaagttcaccatccgtgaaggtggtcgtaccgttggtgccggtcaggttactgaaatccttgactaatttctaacgatatagttaaaaaaagatgcacttcttcacaggagcgcatcttttttcttttaaatttgttttttgcggccttttaaggtaagataacttagtatgcaagatgcaaactcaaatttgacattggaggtatttaattaatgtctgttaaatgggaaaagaccggtaagacaaccggtgatcttacttttgatatttcacaagatgaaattaaattaggtttagaccaagcttttagaagagtaaagaaaaacttgcgtgttcctggctttagaaagggtcacgtatcacgtgtgatctttgatcaatattacggtgaagaagcattatatgaagatgccttaaatattgtattaccaaatgcatattctgctgctgttaaagaagcaggtattaaagcagttggccaaccacaaattgttcctgtatcaatggataaggacaaggattggactatgaaggctactgttactgtagaaccagaagttaagttaggtgactacaagggtatcgaagttcttaagcaaaacactcgtgtttaccaaaaggacattgatgctgaacttgacaagcgccgtgaacaaaatgcagaacttgttcttaagaagggtaaggctgaaaagggcgatactgttactatcgattacaagggtactatcgacgacaagccattcgaaggcggctcagctgaaaactactcacttgaattaggttcaggtgcatttattcctggctttgaagatcaacttgaaggccatgaagccggcgatgatgttgatgtagttgtaactttccctgaagattacggtgcaaaggatttagctggtaaagaagcacactttgcaactaagattcacgaagttaagtcaaagcaacttcctaagttagacgatgaatttgctaaggacgttgatgactctgtagacacccttgatgacttaaaggaaaagatcaagaaggacttgaaggaacaaaaggaacaacaagcaaacgacgctattcaagaagctgcaattgaaggtgctgtaagcaacgctactatcgatgaaattcctgatgctatgattcaagaagatgttgatactcaattgaaccaatacttgggtaatatgcaacgtcaaggtattgacccacaaacttactacaagttgactaataccaacgaacaacaattgcgttcacaatttgaaaagaatgcagctgaaagagttaaaactaacttagttcttgaagctattgttgctgctgaagaccttaaggcaactaaggaagaaattgataaagaaatcaaggatcttgcttcagaatacaacatggatgaaaagatggtacgtaacaccttatcagatgacatgttaggccacgacattactgtacgtaaggctatggatcttattactgataatgctaagcaagttgctaagtcaaagcttgaaaacaaagaagacgatgacaagaaggaaagcaagtaatagtaatatttgctaatttctcaaaaagagcggctataggccgctttttttgctgttcgagcttaatatttatcaatattagttaatttatgataatctgatttttggtagatataggaggaaaaataatggcaaatcagtttacagatcaagaagagattaaatgcgctttttgtggcaaaactcaagaccaagttaagaaaatgattgccggtaacggtgtatatatttgtaatgaatgtgttgacttggctaaaaaaattattgacgatgaattacgagcagattcacttaaagcagctcgtgaattacctaagcctgttgaaataaaaaaggaacttgatcaatatgttattggtcaagaccgtgctaaaaaagtcttatcagttgctgtatataatcactataagagaattagccaaatggatgttgattcttcaactgaattacaaaaatcaaatattgcaatgatcggaccaactggatcaggtaagacatatcttgctcagactttggctcgtattttaaatgtcccatttgcaattgccgatgcaactaccttgactgaagcagggtatgttggtgaagacgttgaaaatattttgcttaagttactacaaaatgctgattatgatttggaacgtgcacagcgtggcattatttatattgatgaaattgataaaatttctaaaaaatctgagaatgtctcaattacgcgtgatgtttcaggtgaaggtgtacagcaatcattattaaagatcttggaaggtacaattgcctctgttccacctcaaggtgggcgtaaacaccctcaacaagaaatgattaagatggacacgactaacattctatttattgttggtggggcattcgacggaattgaacaaatcgttaaaaatcgtttaggtaaaaagaccattggctttggtgctgaaaatgaggcagataaaattaatgcagatgattggacacgccatttgactacagctgacttagttaaatttggaatgattcctgaattcattggtagaattccaattattactacgcttgataaattgagtagtaaggatttggtcagagtgctaactgaaccaaagaatgctttagttaagcagtataagaagttgttatcacttgatgatgttaatttgaagtttactgatggtgctctgaaggcaattgctgacttagcaatccaaagaaatatgggtgcacgtggacttagaacaattatcgaaaattcaattatggatattatgtatgaaactcctagtgaagaggatattgagaccgttgaagtaactaaggacgtaattactaagcacgctaagccaaaggtaatccgcaaaaatactgataataaagaacaggtaagtgtcaatgatcattgaaagcagtagttatgcagttagtgctgttagagaagatcaatatcctaaagataacttgcctgagatcgcattagcaggccgctcaaacgtgggaaagtccagcttgataaataccctattaaagcgtaaaaacttagctaggacctcgtcacagcctggaaagacacaaactttgaatttctacaaagtcaatgaaaaattttatttggttgatgtaccaggttatggctatgccaaagtttcacagaagaagcggcaagaatttggcgaaatgattcaagattatttagaaactagacccaacctaaagggactaattatcttagtagatagtcgtcatgaaccaaccaaagatgatattgctatgtatgattatgctcaatatctaaatatcccaattttggtagtttgtaccaagatggataaaataaaaaagagtcaaactaataaggtgatgtcaggcttaaagaaaaagttgaatctcaactatgatcatgtcaccgttttgacttttagttcggtcactaaattacatgtaactgaattaagtaattggattgaaaaaagaattaatgaataaaaatgaagggctactagtgaataactagtagttttttcttatgagcctaaaattagaataaatttattcaagataaacgatgctaaaatggaaagtgtaaatagaaagtagaggctttatcttggatgatgaaaattcacaaactaaaaaatcattgacgactatgagccttgtgttgatgattatcacaacggtttatggttttggcaatgtttctgtttcttatgagcaaatgacatatgctgggatcatttggtttattttggctggcgtctgtttctttttcccagctggcttaatgatggcagaatatgggtctgcttttcatgatgctcaaggtggtatttattcatggttagctggctcagttggacaaaaataggcctttattgggacttttgtatggctggctaactgggtgctgtggctggttgcaagcgcctcaaggctttggatttcaatctctgcccttatttttggcaaagatacaactcaagaatggaatattttgggcttgcatggtactcaattgataggtgtactagcaattttattcatgattgtatcaacgtacctgtcttccagagggataactggaattaaaattatgtcatcaatcggtggttggttcatgattgtaatgaatgcagtctttattctagctagtttaacggtcttgattatgaatcatgggcaattggctcagccgattactgggtggcaaagttttattatttcgcctaataaaagttttcaaacgccaattacgattatttctttcgtagtttatgcagtctttgcatatggtgggatggaaaccgtcggtggtgtgattgacagtatgaaacacccagaaaaagatttccctaaaggcttaattattgggtcattgttcactattatttcttatgttttgatgatttttatgaccggcttttcagttaattatcaaaaagatattttagcagccaatgccaatactggaaatattacgtataccgtatatggcacacttggcaaagcctttggaaccgcacttcatttggatcctaacacgagtttattgattggtaaattctttactagagcaattgctttatctggtttgatgggaatgacaggtgctctctttgttttgctttattcaccaattaaatccttcatcatgggatctgatccacgtttatggcctaaggcagcgactaaattaaataaacacggtattcctgctaatgcgatgtgggctcaaactgtcttcgtttgcctattaattgcggtggtctcattcggtggtagcgcagcgactagcttttatcaaattctgacggatatgggtaacgtagccgctactgcaccttatattttcttgatcggtgcatttccattctttcttaaaaaagattatccgcgcaagtttagagtgtttactaactataaatggacggttgcgttagtagtctttgttgagctgattgtttgcaccggaattatatttacggttttgcaaccagttttggagcatagatatgcaactgctttttggacaagctttggtccaattttctttggtttagtagcttatcgcgtttccaagaaaaagcatggcttgaaagacttagattaataattaaaaagtaaaaatggcttgcgtgttgcaagccatttttttacgctaaagttgtaatgtcattgaactttggcagattagcaataaatttttcataagcactttgttcagcagtcttttggatctggacattggaaaaatcacctttccttaagtcagcttcagaaagcttaattcgatgagtaaaagtagcgttaccaataagctcgatccaataactatttttttcataatgcacgatagttttaaccataccgccaggattataaactgatattggtgtatttaagttgcctatttcggggtgggttaaagtaagagcaagagaagtcgcggacattccagtaccacaggcattggtaaaaccaacgccccgttcgtaagtgcggacaaaaagtttatttttatctaaaatttgcgcgaaattaacattgacgccatctgtaaagtagggattattgctatttaattttttaccaacaatgcctaagatcgggccggtaatttctgcttgattaacaaaagaaattaaatgtgggttaggtacggcaattgaagtaaaacgtaatccaggataaatttctggcaaccaagcatcaataatccgttcttgtcctaaattatcaaaagggagtgcctctttattaaagcgtacaggagagatctcaactgcaaatgctggcacgttagaagcaaaatctttttctcttctaacacgtaagctggcattcattgtgtcaactaggaaattatcttttcccgttttttcacttaggtaacgagcaacggtgcgtagaccgttgccacacattgatgcttcacttccatcagcattgattacacgcatctggccaagtgagttagaatgcacgggatgattaactactaaaacgccatctgctccgtgaagcagtccagtttgtggattggtaatcttttgcgtaaaattttttagctcggcgtcacttaattcgtgttcgaattgtgtttgatcaagaataaagaaatgattttgcgaaccgtgaactttgaataaattaatcataatgccccctaattaaaaaacttttgataaataatttttactgcttcatcagccttttcttttttagtaccgatcatgattgaaatttgagaagctccctgattgatcatttgtggtgaaatatcatgatcgcctaaagaatcgataatttgacggctgatggtatgtttttgtcgcattccttcgccgacaaccataataattgcataatcttcaatccattcgagttgatctggattaattgtagcttgaatttcattacaaatttgatcaattaactgatcgtttagaaaatcattgttaaaaataatggtaatatcgtcaatcccagatggcatatgctcatatggaatattatgttggtataaaatttgtaatatacgtaaggtgaaaccagcttctttattgagcaaatatttatgcaaatataatgcggaaaaatgtttttggctggttacgccggttattgcattatctgggacaaaatccttttctgggacaatcatagtgccaggattgctaggatcatgagtatttttcacattgataggaatctgtccttgaatagcaggaatcaatgcttcatcgtgaaaaacagaaaagccagcatatgacaactctcgcatttcgcgataagtcattttcttgatggattggggatgctcaataatatgaggattagcggcaaaaatcccattgacatctgtaaaattttcatagagatcagcatgaaagccgcgagctagaatagccccggtaatgtctgacccgccacgggaaaaagtggcgatattaccagacggagtcatgccaaaaaagccaggaaatacgatacgttcatcagccttaattttaatttggtcaagatttaagtagctctctggattgacaatggcatcattgggctcgccagtcacgattaaaccggcttcagccggatcaagaaaacgactattaattccttgatggcgtaaaattaaagtaattaaacgagcattaagccgttcaccatgtgccttaaatgcagctaaaagatatttttcgttaggataaccctgattgggcaactctaataaaatttgtttaataatacttaattccgtatcagctaagccaaaataatgaccaatttcttgatagcgactaaaaattttattcacgatttcaacacaattcttgtgctttaaggctaaatctgcgtacttgattaacagatcagtaactttgatatctgttgtattccttttgcctggggcagagacaaccattacttgtcgttgaggatcgctgagaataatttgaattgcttgtgcaacactttcaccggtagctaaagaagagccaccaaactttacgattttcatttcaaaactccttttgttttcagaaatcattaatttaaataaaaaagtcagactaaatttaattgaattctaacattattttttaatcttgcaagtgatgactgtaatttatcactctaaatgccgcattgttacaaataaaattaaatttttataataaatttgttgactatgtttttataaaattgtaaactacagtcaatcgaagaggcgcagccgacataagtaacaattctgagttgggcaaaacgaagatgaattgtaaaaggggaggttgccgaagctgagtcatgctaaaggcttgagctggggcgtagttgaataaactgcggactgtcgcgaacaaaattcgcggagcgctatcgaccatagattaagtagaaattaatccattgtttgtttggcgcagacaatggattttttattagcgtttcgcctgaaaaagacaggagaacaaaatgaattcacaaattgcagtagatcagattaatgagcaaggccatttaacgattggtggagttgatatagtagaattagctcaaaagtatggtacgccattagtagtttatgatgtcgatcaaattcgtcgacaaattcgggcttttaagaaagtttttgaagaagaaaacatggcctatgctgttagttatgcaagtaaagctttcgcagcaatcgcaatgtatcaagttattgcagaagagggagcatacactgacgtagtttcagcaggtgagttatttactgcaataaaagccaattttccaatggagagagttagctttcatggtaataataaatcattaactgaattggaaatggctgtaaaaaatcatgttggcaaaattattattgataattttcatgagattcagttattggcgcaagttttaaaaaagtacgatgctacgattagtgtcatgttgcgtattgcaccagggatttcagcacatacccatgaatatgatcaaacaggtcagattgatagtaaatttggctttgatcttgaatcaggtcaagcagaaaaggcattaaaacaagttctagctaatcctaggatgaaaatgttggggattcatgctcacattggctcacagatttttgccttaaacggctttgaaatgggagcacaaaaattaatggtagtagcgcaagattggcgagaaaagtatggctatcttgcacaagttattaatgttggtggcggttttgggattaaatatacccaagaagatcatccattacgaccagaagaatttgttaagacgattgttaaggtgatcaaaactgaagctgaaaaaatgaattatcctttacctgaaatcgatattgaaccgggaagatcaattgttggtccagccggttacaacctttatacggtgggtagccgtaaggatattccaggttatcgttcttatattactgtcgatggcgggatgggagataatattcgccctgcactttatcaggctaagtatgaaacagttttagccaccgatccacaagcgcctttgactgaacatgttcgtattgctggtaagtattgcgagagtggcgatatattagcagaagatcaagctttgccacaagtcaaagctggagacttgttagcgatgttggatacaggtgcatatgggtattcaatggcttcaaattataatcgtaatcctcgaccagcagtggtatttgcagaaaatggtaaagcaaaattagtcattaagcgtgaaagtttagaagacttggttcatttagatcaatcatatttaaattagaaaagagaaaaaagatggcaaagttagatgcaaaaagtattattgattacattggtaatgcaccaaaaaagacaccggtaaaagtctttattaaaggagatttagcacaaattgattttccaaaggaaattgagaattttactgaagctcattctggcgcgatctttggtgactggaaagatattgaaccatttttaaaagaaaatcatcaaattacggcctaccatattgaaaatgatgcacgaaattcagcagttcctttattggacttcaaaaaagttaatgctcgaattgaaccaggagctattattcgtgatcaagtggtaatcggtaataatgcagtaattatgatgggtgccattattaatattggagcagaaatcggggctaataccatgattgatatgggcgtagttctcggtggccgtgccattgttggacaacattgtcatattggagctggtagcgtattggctggtgtaattgagcctgcttcagctaaaccggttcaaattgatgataatgtcatgattggggctaatgctgttgtgattgagggtgttcatgtaggtgaaggagccgttattgcagccggagcagtagttactcatgatgtgccagcacatacgatggtagcgggcgttcctgctaaaattattaaaaaagttgatgaaaaaactagtagtaagacggaactagaagataatctgagaaagttataaaatgtcagttttaagtgaaagtgagttaattcaaattagaaggcatttacatcaaatacctgaattagcactagcagaaaaagaaacacatgattatttaatcgaggtaattcaaaaatttaagcaagattatttggaagttgagataccgtcgacactgcctaccgcaattctagtattagttaaaggaagaaaaccacacagaacgataggatatcgtgctgatatcgatgctttaccagttactgaaaaaactggactggcattttcatcaaaacatgagggagtaatgcatgcatgtggacatgatattcatatgaccgtggcattaggtttgttaagctattttagtgaaaatcagccacaagataatttgctttttttctttcagccagccgaggaaagccaaagtggtgggatgcaagcttatgaaaaaagaatttttcatgatcaatttaaacctgacgagttctatggcttgcatgataaccccgctttgcctgctggtagcattgggtgtcggatgggtacactttttgctggtacaactgaagtcaatattgatattctaggtaaaagtggacacgcagcttttccgcaagatgcaaatgatacggtagttgcagcagcaagtttgatcatgcaggttcaaactattatttcacgaagcatagatccaattcaaagtggtgttattactctaggcaaaatcgaagctggtacgattagaaatgtaattgctggtcaagctagaattgagggcacgattcgtggcttaactcaaaatatgattttgacaatcgatcaacgtctcaaagaaatctgtcttggtattgagaaaagctttggtgtagaagtgaagttagacttgaatcaaggtggatattggccagtagaaaataacccacaattaaccaagaactttatttcatatatgaaaagccagccgacggttaactttattactactgaaccaaaaatgacgggtgaagattttggctttttgctgactaaattccctggaacaatgttttggctaggtgttggtaatcctgattcacaattgcatacggctacacttaatcctgatgagaaaagcattcagcgcggcgttgatgcaatcaaaggatttttgattaatagaatgaggcaataaaatggcaacattaattgatgcagatttgttaacggcgattgttacgccatttgatgagaatcaaaaaatagattttgccagtttagaaaagctggttaattatttaattgaccaaggttgcaatggctttgtagttggtggtacgaccggagaaacgccaactctgactcatgatgaaaagatagacttgtaccagcattttggtcaaattgttaatggacgtgttccggttattgcaggaacgggcagtaacgacactgcaaccactatcgccttcaccaatgaggtagcacagattaaaggaattgattatgccttagtagtagtgccaccgtacaataagcctgatcagcgtagcatgattgcacattttagtgctgttaatgctcagactaaaatgccaattatgatttataacattcccggtagaactggcgtaaaaatggaaaaagaaacggtagtccaattatcacgccttaaaaatattaagggaatcaaacaatgtgcatctttagaagaaatggaatacattattgatcataaagatcctaattttttggtatttagtggtgaagatacgcaagcgttacctgcaagattactaggagccaatggcgttatttccgtagctagccatttatattgcaaacaaatgcggcgaatgtttgatgatctttatgaaggaaattatcctgaagcgggcacgattcaacgctggttaacgccgaaaatgcaggctttgtttatgtatccttcaccagctcctgttaaggcagccttgaatgctcaaggatttatagtagggggatgtcgtttgccattagtcgctttaggtgatgaggaaaaagaaaagttggcccagcatttaggtttaaatgctaatgcattgatgcaaaagttgccacttaatttaggaaaggattggtaagacgagatgcctaaaaaagtactaatagctgggtttactggcgcaatggggcaaaaggctgttagtttagttaatcagctgcccaattttgaattggtggctggatttgctccaaaggcagtaaatgagcctgaaagatatcatttacctaaaacagcccaaatttttaaccaattaagtcaaattcctgaccatgctgcagatatttggattgattttactactcccgcagctgtctatgacaatgtttattttgctttaacgcatcaaattaaacctattgtgggaactactggcttgagtgatgatcaagaagcaactttgattgaactagccaaaaaggaaaaattaggtggcttaatcgcacctaattttggaatgtcggcagttttattaatgaagtttgctgaagaagctgctaagtatttccctgatgttgaaattattgaaatgcatcatgcagataaaaaagatgcaccttcaggcactgctttagctactgcaaaaatgatcgcgcaaaatcgtcctgaacatcaaactgcgcctgatgaaactgagactttagccaatgttcgcggtggagattatcaaggaattaaaatccattcagtacgcttacctggctatattgcacatgagcaagttttatttggtggacctggcgaagctttaaccattagacaggattcatttgatcgtgattcctttatgagtggggttaaagttgctttagaaaaagtagatcaattaactgaactagttattggcttagagaatattttataagaggaaaaattatgccagaattagcaaatgacttagctttaagtaagaagattcaatctgttaaggcttcggggattaggatttttgataataaagtttcaaccattcctggaattatcaagctgactttgggtgagcctgatatgaatacacctgagcatgttaaaacagctgcaattgaaagtattcgaaataatgattcacactatgcgccacaaaagggaaaattggaacttaggcaagcaattagcaattatttgaaaaaagcaagtggagtagtttacgatccagaaactgaaattgtggttacagttggcgcaactgaagcaattaatgcgacactattttcaattaccaatcggggtgataaggttgctattcctacaccggtattttcactatattggccagttgcaactttagcagatgcagattatgtattaatgaacacgtcagaagataactttaaattaacgccagaaagattagaaagtacacttaaggaagaatctaatatcaaggcggttatcttaaactacccagttaatccgacaggagttgaatacaccgaaagcgaaattagggcattagctgaagtgataaaagcacacaatctgtacgtaattactgatgaaatttacagtactttaacttatggcgttaagcatttttcaattgcaagtgtgattcctgaacgggcaatttatatttctggattatctaagtcacatgcaatgacaggataccgactgggttatgtagctggtccggcaaaaattatggaacaaattggtaaagtccatggtttaatggttacgactacaactgactcttctcaagctgcagcgactgaagctttggagcatggattggatgatccagaaaaataccgcaaaatatatcaaagaaggcgcgattttgtgttggatgaattagctaagatggggatgcaagcagttaaaccacagggagcattttatattttcgctaagattccagctaaatatggtaaaaatgatatgcaatttgcactggatttagcatttgaagcaaaagtcggtattactccaggtagtgcttttggtcctggtggagaagggtacgttagaatgtcatatgcttccagtgatgaaaatctacatgaagcgatggaaagaatgaagaattttttgcgaggaaaaaaataatggtgaaagaatataatgttgcaattctaggtgctactggtgccgtgggaagaagaatgatcgaacaattggaacaatcaacgattccagttaaaagcttaaagctactcgcatcctcacgttcagcaggtacagttttaaaatttaaggatcaagatttgacagttgaagaaactacaccaggatcatttgatggtgtagatttagtactttcctcagctggtggtgcagtgtcaaagaagtttctgccggaagccgttaagcgtggtgctgtctgtgttgataatacatcagcatttagaatggaaccagatgtaccactggttgtacctgaagttaatccagaagcattgaaaaagcatcacggcatcattgccaatccaaattgttcaacaattcaaatggtaatggctttggaaccagttcgaagaaaatttggtttgaaacaaattatcgtttccacttatcaagctgcttcaggagcagggcaagcagcaattgatgaattaaaaaaggaaagtcaagattaccttgatggtaaagacatgcaagcagatgctcatattttacctactaaaggagacaaaaagcattacccattagcctttaatttgttacctcaaattgatgttttagaagatagtggctattctcatgaagaatggaagatgattcatgaaacaaagaagatcatgctaaatgacatgaatgccaaagatatcaaggtaactgcaacttgtgttagggttcctgtgtcaatttctcatggggaaagtgtctactttactgttgaagatgagactgcaacggcacaagatattaaagatgcagttgctgcctttccaggtaatgttttggaagatgatattaaacatcaaatttatccgcaaccaattaatgcaacaggtaagcgagaaacttttgttggccgcattcgccctgattatgaaaataagggtgccttcaacatgtggattgtagccgataatttgcttaagggtgctgcatggaatacggttgaaaatgcggaatacctagttaagatgaacttactataaaaatttaaaaaaataaaaatgaaagcgcaaaccatgattaaaagtgattttgcgctttttgattgtggtagaatagttcaggattaaaaggagattgaaattttgaagacactaaaaaagttcgggatagctttcattttattttgttcatcgtgtttgataatgtcaaatcatgctgtgcaggcgaagagttattcaaataagcaactacggcaatatacgcttaagatgatgaaaaagcatcatttacgaggaagcattgaaattgtaaaaaatgggcatgttagcttaggctacggttattacagcaaacgactgaaaaatggcaatacaaaattgctttatccagttggttctttgcaaaagatggttactgctgcaataattacacagttaatctaccagaagaaattcaatcagaatactaagatttcacgctggtatccaaatttgaagcatgcaaaccaaattacggtggggcagttaatgacacatacctcaggaattaacgtaattggaacagaatctaatcatggagttaatttttctgaaaatggcgcgatcaattggacaattgcccaagccaatgcacgagaaaatacgggacgcagtaaatttaattacaataatgctaactatgttttgctggcaggcattatcagtaaagtaacgggaaagtcttatgctgctaatgtgaaacagcgggttattcgatcattgaagttgaagcaaacctatatttatcaacaaattccgcggtcaaagactgatgcgatttcatatctttattctggtggtaaaaattacaatgctagtacctatgctaatcgtaatgttgtttctcaattgcctggtgctgggaatctattttcaacggctaatgattattataaaatccaatctggtatgcaaaatggcaagattctgactaaaaaacagttccattatcttggtcatttaagttctaaggttaatacttactcaggtggtttttatctgaaaaagaatcaaactttaaaagtcgcttatggcaattttggtgatacccactttgttaactggatgcaactgactactgataatcagaatggaattgtaatgtttttgaatcaaacttatggtagtaaaaatcatattcgtgcaatcgggtataacattttaaagcatataaaggctaatacctttattaagggctaagaaaaaagcttgttaactgatattgaagttaacaagctttttttaacgatgatttttgggcattttgctgcgctggccaaataattcgccaactaacttgaagaagccgtaagcaattagcaaaataccgataataataattgctctccgattaaaggcactagggttaaccactacgataattcctaaagcaaaagcaattaatgcctcgatcgctacaatagtaatctgaaaaattccgggtaatttacgaaagactagttgcctaattcgaatgtaggaatagataattaagaatagtcctaagaagtagtgagctaagaaaattagtagacggttattagaaattaacgcggttgataaagcaaaaactactaaatacgaaataataaagaagtttttttgtcggtcttttagactagattttgccgttgttaaaatttggtgaacactgaaaccaatccccgtgaaggcaactagggcgccaaaagctcgcactgcatattggggtagagttagactaatgattccgaatactaccagcacccaaccaacaattgtgtctgttgagaaaagcgctttggtcagttgctggctcttgatcgtctgccaaatgctggaaaataatgaaccaaagacgaaacgggttcgccgagatgaatcagccagtgaaaacaaaattgcaccaaaaccgccaaaaccatttttatcaagttcgttgatcttagttgcgccgctagagcttaaagcagagaagaggtcattagttaaagactcacgttcttctagggtggcgttaccaatccattgattgattagttgattatatacttgagattgagcattgcggtggcgtctggtgtcgaagttagaaccgattatttgccaggaaaaagcatcgtgttggcttagtcccttgcgagtactaccaacaatagtggctggaatatttttcgactcaaacaagcgaccgatgacgctaaagtctggcacaaagcggcgtagagtattttgcaaatacttattagggagctgagcaccaacttcttctgcaattccaggtgaatcaaaggtataaatacgtttgattctttttcttaatttgggctcaatattaatggcagcatattcagctaaattgccaccttttgagtgaccgcctaagtaataatcttgatcatcagctttgagaatagtttcgagcaattttactgcttgttgttgggctacagtgattttaaaactaatttcaaaatcttctttccagccaattagtgaatcgtcagtcccacgaaaagcaataaagttggtcccatcagttagttcaattttgattgcactaaattgagtatgttcagttaaggtactaataaaatacgacagttttgcatttttaaagcggtctgcatgagccattaatttaaatagttcttggtattgcaaattatcataacgaggatgatcatctgcaaaatagagcttggcagccttctctaaactaattgtcgttccgttacttttaacaatacctggtaattcaagataagaaaaaatagataaaacaagtgcatcaatatcattaaaaggcgatgttgagaagtcaacgtcaccacgccattttaaatatgtaagaatattattatctggatacatgctttaccttctttaaatataactttataattccatttcaattttaacgtaacttagaaaggatagtgcaagaaaaaagcccttttgagaaaattttcaaaagaacttaagattttatataacatcagttatttattgtggtataataaaacaggtagaaggggattctactacctgcacttgggtcataataagggcttataaaaacaatcaagacccaagagatagtatatcaatatgatatactaaacacaatatctttgtggctttttttaggaatactgttatatttattatatagcagtatttttctacgtaaagtcaagcgcaataaggtgtttggctttattttttacctaaattttgtcatgagtatcttttagtggcgatttatttttttagaaagcatactaaataagcccacctctatatttaatttatgggcttagcgttataatgtacttgatcaattaattacaactaaagtctttttggttatgtgtggctacgttgtaatcatatagttgatcattgataatcagagcataaatggttctgattagtttatgaattgaagcaatagctatctttttgaaccctttggtttgagaggatagctttttgctttcataataatctgctatatgacacggatttgtcttagctgcattatcaatttgtccaatagctcgataaagcaacttacgtgcgactgcattgccatgtttagtaatacttaaattagagtccatttctcctgactgatatctgcctggatcaattccgataaaagcattgattttattaggattactaaatctgcgtaaatctcctaactctgctaaaactctgacagcagtggtctgtgcaaagcctggaatgctttctaggttttctaaatcatgattaggcaaagacttcgctaacttaaccattcttgcgattaaattttctctttgatcacttaaattaagcaatctgtgtgcataatactgcacttgctcgacttctatgctagagcaagatacaactggataagcttgataagctaattcaattaatttatctgcagtccttagagcgtgtttaaaagcaatcccctttaagctcattaaccagttaataagctgttttttatcttctcttcttactaagtcacaatgaggatatcgcacaactatttgccagtaatttttacctttagcagaagaaaatagattttcaatttcaggaaaagtcgattgtagagcttggtgaagtcgatttttagccattactaagtcagctgttaactggtcatagaagcggctcaaagcattaagctgcttataagtttgagattgaagttgattaattggatgatgatatagtctttgaattaaggctaaatgataagcatcagttttatcagtcttattatgacgtagtcccatatccatttcttttttagctttaagaggattaagaattacataatcatagccatagtcttccagaaaagattgcagtgtacgtgaataaacaccggtagcttcaaaaataatttgcggatgtttagaaaaagcggttaattcatgaagcaattgaataaaaccaggacgattattagtaatggttagttcatttttgctttcaccaattagttcacaaacagtagaagtagacttgcttacatcaattccaaaagtaacttgcataataaaaacctccaaaacttagtagtaaaacgtatttacttaagaaatcagatctaattttctaaactcgacatctagtgtccacattcttcgaagagactattgaaaacttaagtaaaactgccagtttattatgcgacatcaagtgtctaaagacctcagggcatatcgttttactactactttaattctacaaaagaataaaaatagtgaatcaattatcccgtcggataactaattcactatttagcttagaatgttttgttttataaaaaagaggaaaaaggatgttaaaagaaggaacatatagtgcccgtgcacgcggcatggcaggctttgtaggtgtgacattaactgtagctgataataaaatttcaactgtagatttagatttatctacggaaacgccgcagtatggtcaaaaagcagaaaaaacattaaagcaggaaattttggataaacaatctgctgatatcgacgctgttactggtgcaacatttacttccaatggggttaaagaggctacaagcgaagccttaaaacaggcaaagtaggagataactgtgcacgttaatacatatttcatcgttgctgcaattattctagtagtatttttgttattcagatcagagcacaagtttgaattcttaaaggctgcaattttatttgtcattcagctgtgttgttcaacaattaatttcttaattttcatggtaattgcgtatttgatcatgagtcaatgggaccatgttaatttgggaaacttgtttttgctgttagcagcatttgttgtactttcaggtgtttttgtttattgggggatgcgactggctagcaaaatttttaagttttcgacaactacactcactttggtagaatattatattcagtggtcgttaatatatgttacagtttatcaagcgatatttagtaacataaaacatattacttcaattacaaacttcatcagagtaggtaattttttagatccaaatttgtttgtagttgcgatactgccatcattcatttcagtttggattgcggtaattctttacaaaaagtcaattaaggcaatataaaaaagaggcgtgagcctctttttttgttattttctttctaaaatttcatccatcttttggaagaagagatccttattggctttagtaacaagagttacttctcttcctttaggatcccgtacaaagcttcctgcacttaacccatcagtgatgactcttgctttagccgtttcggtttcaacaacttctggatatagtgcgctgattgtagttagcacatcccaaaggtagagttcggctgatggtatagatacgattagactatagccttgtcctatcaagtccattgcaggatatttgcgtaaacttgcccagtgctggcgcaactcatcgttaagtggtaattcttccgtactttctaatccgaccatctgaattggaatatttgattcaaatacgcgtttaactgcgtatggatcccaaaacgagttccattcttgactaccgtcagcgttaaccatagcaacgttgccgtgcccatcaagagaaccacccatccaataaagtttttcaatgtttttctcaatgtcgggatcgacatctaaagcgcgagccaggtcagttaacggacctgtcataactaaagcgataggctcgtctgcttctttaattttttcgaccatgtctaaatgagcaggaagctttgcctgctgcgtatcaatcttgccactttcattgagcatgggaagataattaaatgaataagttgccatccgccactcgtgaggaaattggttgactgcacgtgagttggaacgagcaatagtcaaatcatcaccacgtaagttaaaaagatcggtcattttgcgacatgcttcaacactaggatcaatgtagccgtctgcatcaattgcaccaacacctaaaagtttgatatctggtgcttgtagtaagagcagataagatactaaatcatcgatattaccatcatggttaaaataaatttgtttcattgtttatgcctttcttaatatagatacttttattctaccaagcttttagttgaaatgatcgggtagatgattatttttacgataagcgtctctagaatttgggacctctttttgtgctaaaataaaaaacatgaatattgaaacattaaaaaaagaatttagcgctcgagcaaatgaagaaaaggccaatcatcttgttggttacatgcgaaatcaatttctattctatggcctacaaacaccagaacgtagggcgatttatcataattttttgaaagatgaaaagaagaaaaaagaagttgactggaagttgctagaccaggcatgggatgaagaacaacgcgaattgcaatattttgcctgtgattatttattggcaatgaaaaagtatattgtttttgatgatttagctaaaattgagcgttttgttagaacaaagcaatggtgggatacgattgactcattaatcaaaatttatggctatgttggcttaacggataatcgagtagacgatctaatgctcaagtggtcgcacgatccagatttctgggtaagaagggtcgcgattgagcatcaattattgcgtaaaaagaagatgaacaccgcgttattacaaaaaattattgaaaataatcttgatagtcaggagttttttatcaataaggcaattggctgggctttgcgtgattactctaagaccaatccagattgggtgcgtaacttcattgaactgcatcgagagcatttagctaaatgagtattaaagaaggcagtaaatatttataaaataaaaaactgatattcaatgattaaagtctgaatatcagttttttgctattaatagtttaattaatctaagtcttgaccgttagattcgataactttcttgtaccagaagaatgagtccttacgtgaacgagccaatgtaccttcaccagcatcgtttttatcaacgtagataaagccgtagcgcttatctatttgaccagtacctgcagaaacaaggtcaatacagccccatggtaagtagcccattaagttaactccatcgagttcaactgccttttccatttctgaaatatggtttcttaagtagtcaattctgtagtcatcgtgaattgacccatcagtttcaactttatcgtaagctccaagaccattttcaacgatgaataatggtttgtggtaacggtcttgcaattgatttaatgcaattcttaagccttctgggtcaatttcccagccccaatcgctacgctttaaggttggattcttagcaacagctttagccaaatcagttaattcatcaggtttaactttttcgctagaaacggtagtagtctgatagtaggagaagccaacgtagtcaacggtgccttcctttaggacaattttatcttcatcagttatatcaggacgatagccatttcgttcaatgtaggcttcaactgcatttggatattcaccaaaaacatgtacatctgagaaccagtcacggcgttgctcccatttatcagctaaaaggacatcatcacttgatggagttacaggtgagtagttaatcatacaaccgatttggaaatcaggattaatcttgtgaccaatcttaacagctaaggctgaagcaaccaattcatagtgacctgcttgatacatggcggcttctttatctctgtcagtcatgccatctttgaacaaaatgcctgagttagtagccatcaagaaatcattattgaatgcagactgattatcaatttcgttaaaggtcatccagtacttaactttattcttgtagcgtttgaagcaaacttctgcaaaacgaacgaagaaatcgattacttttcggttggtaaaaccaccatagtttttagctaaattaaaaggcatttcaaagtgggagagggtaataacgggttcaatgccgtattcatgacaagtatcgaataagtcgtcatagaactttaaaccctcctcgttaggttcggcttcatcaccattaggaaagattcttgtccaggcaattgaagttctaaaagccttgaagcccatttcagccattaatttaatatcttctttgtagtgatgataaaaatcaatggctgagtgattaggataatttttgccttcaagaacaccgtcagtaatttcacgtggcctagtagctgaaccaacggtcattacatcagcaacagaagtaccttttcctccttctttccaagcaccttcaagttggtgggcagcaactgcaccaccccataaaaagtttttaggcatttttgctgaatacattaaatttttcctcactttcttgtatgtaattggaaacgcttacgagagccattttgccataattgatttttttaatcaagtaacacttatttgccattaactgttaaatcaccacggtcatagcgattacgtgactcagaaatttcaaaaggtcgtccgtcttcaaggaatgccttttgctgaatacataaaacaggatcatcatttttacattcaagatacttcatatcatatgcatcagatttttcagctgtaataatgcgatctgctcggccgatcttaagcccaagatcattttgaatataagagtagattgacttgtgcaaaatatctagggtgataccggggatgcggctaacaggcatcacggtatattctagtttagctggcttcttatttaaaattcgttgtctaataatatcgtaaacttcgtcatctttttctaaacaaagagcttttcgttcactaatactaggtttgcgaatgttaaaggcaatcacattactggttattgcgagagcattattgacatgacgagtaaagccggtatgctcattgacatcagaattaagaaaaatgtcgggaatagacttgcttgtaataaaggtcccatgtcccttgacagtccgtattaattttttattttgtaaaatctttaaggcgtgaacgactgtgacccgactagtttgatatttttgggccagttcaaattgttcaggtagttttcttgtatattttttctcaataatatctttttctatatcattggcaatgtcttgatagcgactcaagattctgcctcctttctattgtaaaggaataaattacatatacattctaacagtattcatttattaattgaaagcgtttgctaaaaatgatttattttttatgttaaatcatgcgtatgtaaaggatttttcttaacatgttgagaatatgcatttgaaaatgcttacaaaggatatataatattcgctgtcaggagataaaagtatatatcttttgctcgagatgattatataagcatggtaagactaagccgtgcatgtataattttttgtttacaaatcaatgaaagcgttttataataattggtgtagatcaataaaagctaattaaactataaaataaaaatttcaggaggaaatttattatggctgaacaaactatcatgttaaattgtagtgctggtatgagtacttcactcttagtaactaagatgcaagctgctgctaaggaacaaggtattgatgcagaaatctttgcttgcccagcatcagaagctgatgacaagatggcacaacaagaaatcgattgtgtacttctggggcctcaagtaagttacatgaagagtgacttcgaaaacaaggttaaaggtaagggtaaagacggtaaggacattcctttagacgtaattaatatgcaagattacggcatgatgaatggtgctaacgttttggcacaagctgaaaaattgatcaaaggtgaataattaattagctaaaatagctaaggaaagtgagacagattttatggcagaagaaaagaaaactccagaacaaaaagaacaagaaactttaatggctgctatgggtttaattgccaatggtggtaatgcaaagagtttagcctttgaagcaattcgcttggctaaaaaaggcgatattgcaggtgctcgtgaaaagttgaaggaaagtgacaaatcacttcttgaagctcacaattcacaaaccggcatgttaactaaagaagctcaaggcgaccacatgcatgtaactttgttggtagttcactctcaagatcacttgatgaatgctatcacttttagagatttagctggagaaatggttgatctttacgaaaagctgtatgaatctggctctcttaaaaaagaagataagtaatcgctgaaaatgaaaataactcctgcgaatgcgggagttattttttttcgataatttttgcctgatttgtgcttaaatataattattaggcaagaaatgagacgaagaaaaatgaataaacaaaacattaaaaaagaacagacagagacggctaagaaaagacatggaaactgtcaaatcttttgtgtaaatagttctttctcgtaaattgattttttaattatttatttaatcaaagtaggattctaaggtgtcctgaacctgaccaaagcctttatgaattcgattgaaataacggtcattgtagctcattgcctgaataccaataaaagcatcaagcgactgttcagttggaaactctgccttaggcttagctttgcgcttgatcacattgttaaatgattcaatcatgttagtcgaataaattgaagctctgatctgcttgggatagttataaaagaccagcagatctggttctatgtctttcaagcttctgataacatggctgtaaaccttgccccatttggtatagaagtcatgcaggacagctgtggcttcttctttgtttgtctgttgatgcacctgtttgaattcgttcatgatcttttcacgatcgtcgacgcgtactttagcgcagatattgcgcatgacatgaaccaaacagcgttgaaaatgagctttaggataagtcctggtcaaggctgttttcatgccaacaacaccatcagaaagaaaaagctcaacttgctttaagcctcgggatttcatgttttgaagcatatctgtccagacttcaatgttctcactaggagcaatgcagtagtcaatgacttccttatgtccattaggtttaatgccaatggcaatatagactgcttcacgctcaaacgtttctcggcgcaaaggaaggtatgtcgcatccaaatagacgcagaaaaacttgtcgcttagcttgcgtttgtggtaagcctcaacctttggaatcatctgcttggaaatatttgatacctgagctggactgtaatggctgccatacatcttttcaattagatcggctatttccctggtggtcacgcccttggagtaaagcttgataatcatgctttccaagatatccgagtgctgcttgtagtcaggcagcgtgtgctgatgaaattgaccgttgcgatcccgaggcacttgcacttcaattgggccaaattgcgtatcaactttgcggaaataagcaccatttctagagttgccagtattccagccatttctggcatagggatcatagcccagaaaggcagtcaattcagcttctagcaagttattaacagcctgttgtagttctttgcgcaataaatcatttattttgtctggattgaatagagcttgagcaaaatctttggtaaaatcattcatgaaggagttcttctttctgtatgtgttttttttgttcaaaccaatcatacgagaaaggaactcctttttctaatgtttaaagaaataaatttaaggaatcattcatccttacacaaactattttacagtctcaagacatgaagatagcattaagtatatgtattttagtcgatatttgttaattagatatattattactattttcttttttaccaacttgatgtggctaattattgatgtaaattatcatagtgttcttggcattattgtttcggcaattatgacaatttatagtgggattgcttcgattgagcagttaactaaaatgcataatcgaaaacgagaggtcccaattagcaaagtttatcttgaagtacaagcagctttaaatttgctttttataatgttgacgtttttgccattgggtaagtatttattcccattcatcgaaaatcaaagtattatgttctttatgacaactttgtttttagctggcattttattgtgtgtttggagcgaataccgaattcatcaaattatgaatgatcaagatcgttatcacaaggttatagagacttttaagaagcaccaacaatagttcatgtaaagttacatgaactttttttattagaagtaatttcaaaaatatacattttaaaaaaacaaaatatatcgtatgtcaataaaaagcgtttacattagaaagcgctttcgctataataaggttgttcagatttaatgatgtttcagaatattgggggaaagaaatatggctgattcaaaatctggctcttttaaagatgcgctagctgcaaaagcaggtaaatttgcaggttcacgttttgttagagctattatggacgctggttatagcgttatttcattttcaattatcggggcagttttcttaattttgaatgtgctgcctcaagcatttccaattccaggatttgccgcattttatgcgaatactttaggacgctttagtggcttattccaagtagtttacaactcgactatgggtatcttggcattagtatttgcaggtacttttgcttattcatacacggatatttatcgaagagaagagaaaattgatttggtaccgatgaacggtttgatgatgttcttaatggcattcttcattacttttccggaacttatttggaaaaatggtgctgttcaatttattactacacgcgtggtgctagttaaatctttctagacaataagccaaattataagctaaaattgcaatttccaaccggctttgaaagcctatcagactacgtgctcgattgttctcggcattataataggtcagaagcgaaaagtcgctttcaattgttctgcgaatagccatcaattgatgatcattgtgctttttagctcctgtcatatttttacgatatggtgtccaaagttcataacccatttgttttagctgttgatgcagttctttgcctaaatagccttcgtcgccaagaagatagtaattagatggatgggcattttccagcagttcaactgtctccttggcatcatgaactgatgcttttgttacgacataatcaagaatggaaccgtcatcgctaacaatggcatgaactttgaaaccatagaagtaaattttcttggtggccttataaccaatgttggcataaccgcgaaaaattttagcacgatagttgcgaattggttggcaaacaggtaccggaaagctgtcaatgatcaagaaatgtccattcaggtcaacctttttattcatttcttgccgtatctgataaatcaattgcaatagctgacgtgaacgccgattaaaacgtgagtgtgataaacaattgaaacattcacagaatcttctttgtgattcaattcctgtcttagcttgccagataagtaaagccaaaatcagactgtccgtagttttaatttgatcaatatttcgccgatgagtaaactcagccggtgcatacaaacgataccagtgccgacaaattatcactaaatctttaaaactaacttgtaaatggtggctaaaacgcttaagcttaaggcagttcaatcagatcagactcttttctattattactatttacaagtcgagtctaacaagattggacttttttattaactaaaacgatttaactagcaccatgcgtattactacatttactaagactaaaatggtggcaggcggttatgaagcctcaacaaatggtattaccagaattgctgccgttggtatcttcactggattagtaattgcatggcttacagttcagatctaccgttacactgttaagcacaactggagaataaaaatgcctgcatcagttccatctggtgtttctaactcatttagcgctttgatcccaggcttttgtattgctgttgtagttgcattgattgaactaattttggtaactttaggaactgatattttccaagttctttacattccattctcatttatcagtgcaattgctgatacttggtggggctttttgattataattttcttgattcacttcttatggtggttcggaattcatggtgctactatcatgagctcattctatactccaattgttttagctaatatggctgctaatgtaaatggtgctaatcacttctttgcaggtgatccgatgaactcctttgtaattattggtggttcaggtgctactttagggatggcaatctggttagcctttggttctcgttcagctcaattgaaagaaattggtaaggttgaattggttcctgccatttttaatattaatgaaccattgttattcggtttgccaatcgtttataacattaacttgcttgtgccattcatttgtgctccacttgcttctggcttggtgggttacatcgcagtaacttcacatttagtacctaagattattgtgcaacaaccatggccaactccagtgggtttgagtggttatcttgcaactactagctggcaaggtgccgtgctttcaattgtttgtgcacttgttgccttcttagtttggttcctattcatcaagcactatgacaatgtcttattgaagaaggaacaggctgacgctactaagaactaatagattaattttgatatagataagattgttaatttgaacaaaaaaaagaccataactacaacacaattagaagtagttatggtctttttgctgctgagatggcgattttaagctgcaatattagctaaaacattgtcacccattcgtcttaattctttctttgcgcccatctttaattggaaattgtaaaacatggtttgtagtttgccgtgtttctcacggtcaaagctaagcatgtcttcagaaaaggtgatttttacaccttgatcgttgtcttcagtgacataattaatcactaattccattcgatctgtcttaaaatgagccccatagaccttgtttctttcgtaatcggttaattttacttgggcaccatctacttcgtatttagtacctttagcaagcgttaccggcatgtcattaccgcgagcttttttaatagcaggaattaattgttcttcaaggtaatcaaagaaatccttagccttgaagttgaattgtttagtaattgtaatcatacttttccttctctcatctatattacttatgctttcatcatatctttttagaaaaatagagtctagcattttttagctaggctctacttataaataaaagttttagtctaaatcctcaccatttgaggtgatagcttttttataccagtagaatgaatctttaggataacgcttgagtgagccattgccacggtcatcacgatcaacatagacaaaaccataacgtttcttcatctcaccagtcccatttgagacaagatcgattgctgaccaggtagtgtatcccatcaaatcgacaccatcaattgtgacagcatcccgcattgatttgatctggtctcgtaagtaatcaatacgatagttatcatgaattgagccatctttttcaagggtgtcagcagaacctaaaccattttctactacccatagaggcttgtggtaacgatcccagagctcatttaggccgattcgtaaaacatctggatcagttgcccagccccaagcattactctcaagatatgggttaactacaccaccagcagaaacattaccgttagctttagcatcagcttcatgagtggttaaaacgtttgaggtatagcaagaaaaacttaagaaatctgctggatatttagcgattaattcataatcttctggtgtatcattaagcttaatcccatcacgttcatatttcttaagacgatagttagggtagcggccgccagtttgaacatcactgtagaagagcatctcttgcttggcttccagcactttaagttgatcagcaggatcacaagtgtaagggtagtaggcagaataagctagcatttggccaacacggttgttggggtcaatttcatgggctaatttaactaccttagcgctagctacgaattgattgtgagcaccttgagcacgattttgttcgctaccatcgattaaaccgccacccatataaggagccatgtccatggcgttgatttcgttaaaagtaagccaatatctaactttgcctttgtagtgcttcatcacgatatcagagtagtgaacgaaagcatcgattaaatggcgatctttccagccaccgtagcgggtaattaaagaaagaggtgtctcatagtgggataaagttaccagtggttcaatgccatacttagcacattcatcaaatactttatcgtaaaaggctaatccgtcttcattaggttgttcgtcatcaccatttggcaaaattctggaccagttcattgatagcctgaaaacatcaaagcccatgtcggccattaatttagtatcttcttgatagtggtgataaaagtccgttccttggtggctagggtagtagtaaccgtctaaaatagttggaacagcacctttaggtagactaaattcttgcccccaaactagaggcgtagctccagtttcaccattaggctttttccaagttaccttacgcggttcagttgctgaaccattagttaaaacgtcaacggcatttaatcctttacagccttcatcatatccaccttcatattggttggcagcagtagcgccgccccaagtaaattcttttgtaaatgacatatattacctctaaaaacgattattatctaacaatacataatcacgggtatcgtaacgattcttgctgatagaatattcgacaggttgaccattagtaagccaaataatctgttctaattcaagaataggatcatcttttttggcatttaaatatttttgatcatattcgtctgctttattagcacgaatcttacgataagcgtgtccaaattttaaattaagattcttatggatgtaatcataaattgatttatgcaagatgctctcatcaagatcaggaaccaatttaactggcatgtatgtatgttcaaggataagaggcttatcattataaagtctcaatcgcagaatattgtaaacgggttctgttttcttgatttcaagatttctttgcatttgttcatcaggaaactctacagagaaatgaacaatttgactcttaacggcatctttgcctagttgatttcttaaaccaatgaatgcattagctggagcatcaactttttccttaattggaatttctccagtaacgaaggtgccaagtccggattgtttataaaccagaccctgtcgttcaagaccatcaaatgcttttttgacagttaagcgactgacattaaattcttgagcaaatgtctcttgatcgggaagaggctcttgcttattgtagatgccttgtttaattctttttcttaattcatttgctacttctagatattttgcctttgccatgtttttccatgagactgtaaaatagtttgtgtaaggatgaatgattccttaaatttatttctttaaacattagaaaaaggagttcctttctcgtatgattggtttgaacaaaaaaacacatacagaaagaagaactccttcatgaatgattttaccaaagattttgctcaagctctattcaatccagacaaaataaatgatttattgcgcaaagaactacaacaggctgttaataacttgctagaagctgaattgactgcctttctgggctatgatccctatgccagaaatggctggaatactggcaactctagaaatggtgcttatttccgcaaagttgatacgcaatttggcccaattgaagtgcaagtgcctcgggatcgcaacggtcaatttcatcagcacacgctgcctgactacaagcagcactcggatatcttggaaagcatgattatcaagctttactccaagggcgtgaccaccagggaaatagccgatctaattgaaaagatgtatggcagccattacagtccagctcaggtatcaaatatttccaagcagatgattccaaaggttgaggcttaccacaaacgcaagctaagcgacaagtttttctgcgtctatttggatgcgacataccttcctttgcgccgagaaacatttgagcgtgaagcagtctatattgccattggcatcaagcctaatgggcacaaggaggtcattgactactgcattgcacctagcgagaacattgaagtctggacagatatgcttcaaaacatgaaatcccgaggcttaaagcaagttgagctttttctttctgatggtgttgttggcatgaaaacagccttggccaggacttatcctaaagctcattttcaacgctgtttggttcatgtcatgcgcaatatctgcgctaaagtacgcgtcgacgatcgtgaaaagatcatgaacgaattcaaacaggtgcatcaacagacaaacaaagaagaagccacagctgtcctgcatgacttctataccaaatggggcaaggtttacagccatgttatcagaagcttgaaagacatagaaccagatctgctggtcttttataactatcccaagcagatcagagcttcaatttattcgactaacatgattgaatcatttaacaatgtgatcaagcgcaaagctaagcctaaggcagagtttccaactgaacagtcgcttgatgcttttattggcattcaggcaatgagctacaatgaccgttatttcaatcgaattcataaaggctttggtcaggttcaggacaccttagaatcctactttgattaaataaataattaaaaaatcaatttacgagaaagaactatttacacaaaagatttgacagtttcttttccattctatttctatattagatttatatttttattatatagcaaagtctatactttagtaaaaaagagacattattttactatttttatagcttaacaacgtctctttttatgaattatttcaaatctttaataccttgatcaattgcatcatcacagtcaatagggagtcgtaaaaccatttgaccatcgatttcaattcctttagggatttggataacaccagggaagtgatatccatgatgagctttagtttcatcatccaagtatacagatacttggccatcggctttgacgccaattttataatggtgaccgtcacgatcaaattcatttacaattttttcttcattattcaattttaaatacccgtaaattgcaataataaattgaacacttttaatcaagctgcttgatagattagatctaattctctttcaaagatttcatctggtgtatgatatgccaatatctttcttggtaaagagttgcaccaggtttcaatgtctatgatgtcttgtagtgaataattgtctattgcctctcccttaggaataaatctgcgaatgagtccattatgtctttcaacggttcccttgtcacaagatgtataaggatgagcatagtaaactaaagtatttgatacgtcttctaagcttgaaagatctgcaaactctgagccattatcagtggtaatggttttaaaaatatcattccaatgttcgctgtattgcctttggagttctttaaaggcctgcatgacactgacagaagtcttgtcaggaatacgaagaattaagaactcacgactcatacgttcagataaggttagcagcacctcatcatctttgctcttatgtccgagaactaaatcgcattcccaatggccaaacttattacgtttattgatttctttaggacgttcttcaatgcttctgccaagttttttcttatttctgcgaatacgatgaagcttggtattgcgtttaagcttctctggcaagtcgtaattatgtatatctaatagaccttggtcgacataattgtaaagagtcttagtacagacaacatctctgctgctaaatgcgccaacagcggtggcgcgattactgcacacatcaagcgaccagccgtctttaaagaaatgtttgtggacatagcgcatgaattgagttttcctgagaaagtctgatttacgtccacaatttttacgatgagcttgatatgcatcatgcccttgagtagccttatatcttttgactttgccatgatacagttctacagtaccgcgcttaacctcataactgatagtagaaggggaacagtttaattcacgggcaatggcacgcaaagaatagccatctttcaaacgcaattgaataataactctttcctcgaatgataaatgcttgcctttaatgtgatgattcatggtagaatgtaaagagtccattttgacctcgtttctaaatgttgtgtggtaactacattctatcaaactaaactgagacctaaaagttagacacttttaggtctttttctacgtaaagtcaagcataataagaagtttggcttcattttttgtttaaatttcaacttaaacatcttttagtgtcgatttatttttttagttagacacgacaaataagcccagatccatatctgatttttgggcttagcgttataatgtacttgatcaattaattacgactaaagtctttttgattatgtgtggctacgttgtaatcatatggttgatcattgataatcagggcataaatggttctgattagtttatgaattgaagcaatagctatctttttgaaccctttggtttgagaggatagctttttgctttcataataatctgctatatgacacggatttgtcttagctgcattatcaatttgtccaatagctcgataaagcaacttacgtgcgactgcattgccatgtttagtaatacttaaattagagtccatttctcctgactgatatctgcctggatcaattccgataaaagcattgattttattaggattactaaatctgcgtaaatctcctaactctgctaaaactctgacagcagtggtctgtgcaaagcctggaatgctttctaggttttctaaatcatgattaggcaaagacttcgctaacttaaccattcttgcgattaaattttctctttgatcacttaaattaagcaatctgtgtgcataatactgcacttgctcgacttctatgctagagcaagatacaactggataagcttgataagctaattcaattaatttatctgcagtccttagagcgtgtttaaaagcaatcccctttaagctcattaaccagttaataagctgttttttatcttctcttcttactaagtcacaatgaggatatcgcacaactatttgccagtaatttttacctttagcagaagaaaatagattttcaatttcaggaaaagtcgattgtagagcttggtaaagtcgatttttagccattactaagtcagctgttaactggtcatagaagcggctcaaagcattaagctgcttataagtttgagattgaagttgattaattggatgatgatatagtctttgaattaaggctaaatgataagcatcagttttatcagtcttattatgacgtagtcccatatccatttcttttttagctttaagaggattaagaattacataatcatagccatagtcttccagaaaagattgcagtgtacgtgaataaacaccggtagcttcaaaaataatttgcggatgtttagaaaaagcggttaattcatgaagcaattgaataaaaccaggacgattattagtaatggttagttcatttttgctttcaccaattagttcacaaacagtagaagtagacttgcttacatcaattccaaaagtaacttgcataataaaaacctccaaaacttagtagtaaaacgtatttacttaagaaatcagatctaattttctaaactcgacatctagtgtccacattcttcgaagagactattgaaaacttaagtaaaactgccagtttattatgcgacatcaagtgtctaaagacctcagggcatatcgttttaccactactttaattctacaaaagaataaaaatagtgaatcaattatcccgtcggataactaattcgaaactgtcaaatcttttgtgtaaatagttctttctcgtaaattgattttttaatcatttatttaatcaaaataggattctaaggtatcctgaacctgaccaaagcctttatgaattcggtcgaaatagcggtcattgtagctcattgcctggatgccaataaatacatcaagcgactgttcagttggaaattctgccttaggcttagctttacgcttgatgacgttgttaaaggattcaatcatgttggttgaataaattgaagctctgatctgcttgggatagttataaaagaccagcagatctggttctatgtctttcaagcttctgataacatggctgtaaaccttgccccatttggtatagaagtcatgcaggacagctgtggcttcttctttgtttgtctgttgatgcacctgtttgaattcgttcatgatcttttcacgatcgtcgacgcgtactttagcgcagatattgcgcatgacatgaaccaaacagcgttgaaaatgagctttaggataagtcctggccaaggctgttttcatgccaacaacaccatcagaaagaaagagctcaacttgcttcaagcctctggacttcatgttttgaagcatctctgtccagacttcaatgttctcactaggagcaatgcagtagtcaatgacttccttatgtccattaggtttaatgccaatggcaatatagactgcttcacgctcaaacgtttctcggcgcaaaggaaggtatgtcgcatccaaatagacgcagaaaaacttgtcgcttagcttgcgtttgtggtaagcctcaacctttggaatcatctgcttggaaatatttgatacctgagctggactgtaatggctgccatacatcttttcaattagatcggctatttccctggtggtcacgcccttggagtaaagcttgataatcatgctttccaagatatccgagtgctgcttgtagtcaggcagcgtgtgctgatgaaattgaccgttgcgatcccgaggcacttgcacttcaattgggccaaattgcgtatcaactttgcggaaataagcaccatttctagagttgccagtattccagccatttctggcatagggatcatagcccagaaaggcagtcaattcagcttctagcaagttattaacagcctgttgtagttctttgcgcaataaatcatttattttgtctggattgaatagagcttgagcaaaatctttggtaaaatcattcatgaaggagttcttctttctgtatgtgttttttttgttcaaaccaatcatacgagaaaggaactcctttttctaatgtttaaagaaataaatttaaggaatcattcatccttacacaaactattttacagtctcactaattcactatttagcttagaatgtttactatgtctaaatttaataaagaacaaaaaatagaaatttatcataaatggaaagatgaaaatatctcaatcagtcaattggctaaagcgtacagaatgaatctagctaatttagactatatgcttagattaattgatatgcatggaatagaaattttaactactaaaaaccaaagctattccaaagagtttaagcagcgaactattgaacaagcaatctttggcaataaaccatacttacagctgtctttggaactggggtttaaaagtattggcatgcttaacaattggattagagaatataagaaaaacgggtataatgtcattatcaaacagaaaggacgccctgcccgtgaccaaagaaaagcagaaatctcgcaaggaactggagaaagagatccagcagctgaaagaagaaaacttgcgattgcgtattgtgaacgaatacgtaaaaaaactaagtgccttggatcaagaagatcagaagaaatagctagggtgattacggatctaaggcaagaattcaaagttagtttaaattatgtattagctgcgattgcagagcaccctgagctacctataattgccagaagctcatactacaagattatcaaacgacagcccgtcaagcctaaacggtcaaagcttattgctagaatccatgagatttttaatcatcatcaaggccgctatggatatcgcagagtagctttgcagttaatcagagagggctggaaagttacggagaaaaccgttcgctattggatgcataaattaggtcttaaaggcatcaggcgcaataagcgcaaatattcaagctataaaggtactattggcaaaatagctccaaatttaattcatcgtgatttcttcgcagccctgcctaacacaaaatggtatactgatatcactgaatttcatcttaataatgaaaagctttatttatcgcctattctagacggctgcggtggcgatatagtttcttatactatctccaaacatccagatatggatttagtaatgacaatgcttgacaaggcttttgccaaagaaacagctcttaataactgcatttttgatactgatcagggctgtcagtatcaaagccctcgttatcagcgagctttaaaactccatggtattactcaaagcatgtccagaaagagcaactccatggatgatgggctaatggagaacttctttggcctgctcaaaactgaaatgttctatgatcaagaatacaagtatcataatcttcaagaattaactcaagcaatcgaggaatatatcgaatactataacaacgaaaggataaagagcagattaaaaggcttaaccccgaaagagtatcgaagtcaagcctctattaatccaatattttaattgtctactttttacgtctcagtacagtgctttcgaggcttttcttttatattattttttcttagaaatagagtcacggatatttaattgactatggcaagtgatcgtaagtggaatttgaatatcttccgtaattagatctttagccaaacgaacggcagtcttgcccatttcttcagtattcatatagacactggatagggtaggagttaagaagcgattgatatctacatcatcaaaactaacaacagagatatcgtcagggatgttaacacctgcatcactaaaggctttataaacacctaatgccataggatcactaccgacaacaacagcagtaggacgttgttgcagttttaagatctcttttccagcttcaaaagcagagttagttgaccaatcagtaataaaagaatggcagtactggtcaagattgtggagtttcatccaggacaagtaagtgagttcacgtagatcatttttttcacaagcaatcttaccgtcaagatcaagaaccaatgattttccaccgatgtaaacaatgttcttgtgtcccaggttatagagggtatcaagaatatgagaagtttcttccacaaaatcattacgaacgatattacaattatgaatattggtgttgacgtcgataaaaattatatggggattaatgctttgaatctgcttaattgctacaggtgtcatttcaccctcgattagcactgcgccaaatttagctaagtcagcccaatttttattatcatcttctattctaaaaggttgctcaatacgtaaatgccatttcttggcttcttcattaatgcctttatgcagattgagaaaatagggatcggtgatttcacgagatttgttataacgcatgattagtgcaatcgagagctggttatcagtttgcttgggaccaggatgtttttgagatttcgaataatgcaggcgtttggcggtttcgataacgcgggcacgactagcctcattgattctaaaagttggatcattgtttaaaattcgtgatacgctagctggcgataccccagcaatacgtgcaatgtctctaatacttgccataaagatgctccttgtttgtttactgtttacattatacaacttttagcaagaaactggtgtataccgaacttgaggataatagtttagtgtccataaagtaagtcatattgaatcaatgttacttactttatggacactaaatttacttattttactacactacatagtaaagtgtagtaaaataagtaaaaaagcaattgaaaaagaagaatatggaaataataaaatcttaataatttgttcgcttgtttttatatttgtaattcattaaacttatgttcgaaataatgaaaggagaaatatatttttcaattgtaggtaatataattccatattcgtatattgacagtacttatgaaacaaaaatcattgattagtcaactagcaaaaatacataacggtacaattactcatcgtgaattagcattaaatggagtatcaagttatagtatttcgaaagctgttcaggatggtacgttagaaaaaatacgtccgggaatttatttatttggtgatgataccgaggatatattttatagtttgcaacaaaaatataaaaaaggaatctattctttagaaacagcattatatttatgggggttaagtgatcaatatccttttagcttagatatgacttttcctaggggctacaataatccaactttggatattgaaataaatccacatattcaaactaaaagtttggctactcagggaataactcaaactgaatcattcaatggaaatgtgattaatctctatactcctgaaagaactctagctgaaatattgcgaccgattaatgctgtagatatcgaaataattaccaatgccttcaagatgtggaataaggaaaagaaaaaagacataaatacattaatgtcttttgcagaaaagtttagggtaactagaaaggtaaatagctacttagaggtgttgttgtgaaaaattatgttgatgagaagcagttcaaagcagatgtaagaaggtatgctagagagcataatataaaaggaaatgagattggtcgattatggcaagaaattatgttagatgatttgctagaaagaatttcagtatcaaaatatcgagataatttcattttaaaaggtggttttttgttgtcggctattgttggtatcgataaaagatccacggaagacattgatgctgagataaaaggattagatttgaccgaaaaacaaatagctaaagtatttgaagaaatctgtcaaataaaattagcgggggatctattaagcatttcgttgtcagaaattgaacagattcatgagcatgaagagtacaagggctatcgattacattttaatgcttcttttcggaagataagatatccattaaaagtagatgtttcaacaggggatgttattacacctagggagattgaatatagctataaattacatttagaagatcgacatattaatatttgggcatatactatggaaactatagtagcggaaaaattagaaacggtaattacgagaggaatagctaatacacgtatgaaagatctctatgatttattcatactgcagagagaacgaatcaatttagctactttaaagtcagcttttgctaatactacgaattaccgtgaatcaatcttttggacaggacaagatatagattataagtattgtctaagacaagtagatattattgctgaaaatagtaatatgcagaatctttggaatagatacgtgagaaaacatccttttgctaagggaatcacttttactcaagttattcaggcagttcaaacttggctaactaaattagagtttgaaaaataatttcaatcaaaaatgacgctagttgatcgaaccagcgtcatttttttagataatagatgtagaaaatagtttgaaaaacgattagtttttatagaaatctttattatactttacttgtcttcgtagccctttgggtgactcttgtgccagttccaagcagttgcgataacgtcatcaacactttcatgctttggcttccagcccaaaatagttcttgctttggttgaatcagcaaccaaagagtcagggtcaccgccacgacgtggacccattgtgtaaggaatatcaatccctgttacttttttagcagcgttcaaaatttcaaggttggagtaaccttgagcagtacccaagttaaagacatctgacttattagtctccatcatatgtttcagtgccaaaatatgagcatcaattaaatcttcaacttgaacgtagtcacgaacgttggtaccgtccttagtgtcatagtcatcaccaaagatagtaaacttaccatccccagaaattgcactcttcaaaatatttggaatcaagtgtgtttctggtgcgtgatcttcaccgattgtgccatcacttgcagcaccagcaacgttgaagtagcgaagagcagtgtacttaataccatcagctttatcagcccaagccatgatcttttccatcatcatcttggtttcaccatatgggttgattggatcaagtggggtgtcttcggtgattggcaatttcttaggaataccataagttgcagcacttgaagagaagactaagtatttaacaccagcgtcattcatagcttgtaataatgaaatcatgccagtaacgttattgtcatagtacttaagtggctttttaactgactctggaactaatgaatatgctgcaaagtgcattacagcatcaatcttttcatcacgtaaaattttgcttaccaaaaaagtatcttcaatatcgccttggtaaaacttagccttaggatctacagcctttctgtgaccagtatataaagcatctaagacaacaacatcattgccttctttaactaattcgcgtacagcgtgtgagccgatataacccgcaccaccgacaactaaaactttcatgttttgcgctcctttattttagttattatcttttattgaaatcgattacattataacacatattttagtaaataatttactgattttaaataaaatatttaaaatcaaagcaatttaaatgaaaattcgcaatcttggctaggattgatccgatatttgtcttcaacattgctgccccaactgtcaatgccgccaacaccgcggacagcaccagcaattaccaaaacagttctgcgggctaatggcagttcttcaatatgagttgcattttctagttcttctgctgtgtagggaaggcaactgaagttgaatggcttatcagtttgctcaacggtgaggtcaaaatcctcattagaatgatcagcattgttgagcgtagtatttctagtgattttgagttgatgcgtttgcatgtgcatcccattttcctgtggcactaggtatttggttactggcaatcccttaattttaaaagagccagcactggctccagccatccgatcaggataagtctcaccagataagccttcatattcaaagccactagctagagttggtatgataaagcgcattccaattactggaagcggtggtaaatcttttttaccaaaataacgcatcttaattataacatgaccattattgttaatttggtaagtaatttcaacttttgtttttggaatagttaaagtttcataaataaaagtaatttcgactttacttgcgtactcatgattagaaaattggttgttgagtggagcgattggcaaatctgcaaaatcatgttgatcaactttgagctgaatttcagtacagtggctaaacatatcggcgccgagccattgagctgcttttaagttgaaaccgttgccgcgatcgttatcagtagttgcacgccaaaaggttggggtaggaacgcgataaaaccattctttacccttaatttttaaagactctaagccacctttttcatagctgaaaatatattgcttatctggggtattaatgcctaaagtagcatccccatagattatatgtaaattatttgtgtaagccatagtagtatttaacctcctgcattgctggttttggcgtacgatcggcgaacatcaagccatctcctgaaaattcatagtcggaatggcggtcatcgaaatcaccaccataacgcaacacgtcttggttgctaactggatcatgtactaatagcgcttggtcgatgaagtcccaaataaagccgcctaaatattgtgggtattggtcaagcaatttaatgtaggaacccatgccaccatcagaattacccatatcatgcatatattcgcattctaaaaatggcttttgaggcttatttttaagatattcttcaacatcttttggtggtaaatacatccagctttcaagatcagaaatcttgtcctttaattctggcgtatgaaccacgccttcatagtgggtcaggcgactatgatcttgtgctttataaaatttattcatagccgcaatgttttctccggcatatgattcattgccaagagaccagaagagaatggcggtatggtttttttaagtttcataattgttgcgggcacggtcaattacagcttcacgccattcaggaatagaaccgggaacattatctgaaggttcaacttgtcccatcttttgccaagtaccatgtgattcgagattattttcagccatgacatagattccattttgatcgcagagatagtaccacggaatctgattaggataatggcaagttctaaccgcattgatgttattttctttaaaagcatgtatatcttgtttcatatcagttaaagtgatgctgcggccacgcttcatattccattcatgccgattgaccccattaataattagacgttgaccatttaataaaacaaccttgtcagaattaatttcgatttttctaaagccgaattggtaaggaattagttcaagtaaatcaccattttcagcgtgaacttcaataattagttggtacaaatatgggtcatggttatcccaaagatgcacatttttgaataattctttttcaatttttatggttaagctgattggtgcttttttctcaagtagagttttgccattaatatcttctacgaacaagtgaactgagccagtatttttgcctgtaaagtgcaattgagcattaaagattccatcttggtaattatttgtaacttctggttttaaatcgagatcggttaaatgcgtctcaggtaggccgagcaattcaactgaacgaaaaatgccagaaaaacggaacatatcctggtcttccaagaaagaggcagtgctatgtttgaaaacttcaactgctaaaatattgtttttgtttttaatgtaaggtgttagatcaaattctgaaggagtgaaactgtcttcggcgtaaccaacaaaatgaccattgagccaaacatacattgctcgctcaactccttcaaaaacaatgtgaacatcacgacctcgcaaagtggaatttaagtcaaaatgcttaatgtaagagccaactgtgttatctgcacctttgctaaaagagtcggtagctttttggttgattgtgtaagcaggtcgacgataaatttttccttcccacggaaagagcgtattaatatattgattttgagcgtaattatttagctcaatttcacttgggactggaatgtgatcaaatgatgaagaatcgaaatctgttttaaagaaatcaacgggtcgtgtttgtggattagctgaaaacttaaaacaccagtcaccatttaaactttgaacaaaactactagtttgcttttgccattcgcgatagttcttgaaatagggatgatcgctgtgggcaggaacttgattaacgcggaaaacttcggggtcatcaagccagctaagatttgctttcatgaaaatacctgatttctataaaaaaattaaccttgaaaacgcttatattatagcatatagataataaatttacttaataagtaaattatttactgaaaaatattttgaagattaatctttttgacccgaaaacgaatgataaagtgcttatgatatttattggaattacgtaaatattttgtataataaagttaaaaattatttatttaagatagaaaagatataaatatgacaacaattaaagaaatagcacaagaatcagggtattcttcagctacggtttcgcgcttattaaataatgatcctaatttgtcaattacggctgatactaagaacaagattttagaaattgccaataaattgggctattggaaggatcatcaggagaagaagattcgtccaacaattgcgttactataccgagtaaatcatgaagaacaattgcaagatgaatactttacttcactgaagcaggcattaatttcaaccgtggaaaatgaatcattgcaaatgaagaccttttatgatgctgatgatttgatcaagcatgcgtctctttttcaaggctttattggagttggcgcagctccgattgaaaatgaaacgcttaagaagttacatgaggttctgcctaacggtgtttttgtcgatactaatccagcgcctgaattatttgattccattcgcccaaatttaacgctgacagtaaaaaatgcaattgatctttttctcgataaaggatatcagcgcattggttttataggtggcgttgggcctaagcatgatcatattcaagaagtagatgtacgtgccactgcttttgcggagtatatcaaggtgagaggcaaaagtgatgaattgatgtttgttaatggcccgtttagcgttgctaatggctataagttgggaaaagaggtactggctaaatgcaaaaataaattgcctgatgcatttttaattgcttcggatactttggcagttggagttttgcaagcttttaatgagaacaatgttaatgtgccaaaagatactgcaattttaagtattaataatagtaatgtggttaagtatgtttcaccgccactttcttcttataatattgatcaacaagagatgattgatatggcattaaatatgctaacgaatctgattattcaacctaatcgggcacacattgatgtaaatatgaatactaatttagttgtgcgcaagagttttgtgcctaagaagtaaattaattagtaaataaaaatattttttagtaatactctcaaaagagaatgctaatttaatgcgttctctttttgtttagctttcagtaaataatttattaaatataaataaattctttacttaacaaaaatagagaatatactaaactatgtaaacgattacaattaatgattgctttagggggcaaatttatgacacacagtgacaagtcagggaagcagattctttcctacgcatcattctgtttgggtaacttaggtcactcggctttttatggtgtgatgagtacatattttattatttttattactagcagcatgttcagcggacttaatcagtccgttgcagataagctgatcggcttaattacaggattgatggttgtaattagaattgctgaattggtaattgaccctattctaggaaatatagttgataatactaaaactagatggggcaaattcaaaccttggattttaattggtactttagtaagtgccgccttattattagttttgtttactggcatttttggattagcacaaaaaagttggattctctttgcgattttatttgtactaatttatatcagttttgatgtattttattcattatctgatgtttcttattggggcatggtaccagctttaagtgaagattcacatgcacgtggtatttatacttctttaggtgccttttcaggaactattggttggaacggattaacaattattgttgttccattagttacagctgtgacttatgcggtaactggtaaacatgaggaaggtgcgccaggttggttagcatttgcggcagtaatttcagcgttagcaattatatgtgccttgattgtttgttttggtactaaagaaaagcacaatattattagaaactcagctaagcaaaagactactttacgtcaagtattcggtgctattttccataacgatcagattttatggccaagtttagcatacttgctttactcattagcatatgtaattaccaatggtgttttgttctatatgtataaattcgttattggtaagccaaatgacttctgggtagttggtgttattgcaacaattatcggtttctgtattagtccaatgtttccgattttgaacaaatacattccaagaaaatggttattcattgctggacaaacttgcatggttttagcttatgttttgtttattttcggcagagacaacgtatttttgatggacttgggcttagttcttttaaacattaactttgctcaattggtaactgttttaacattaactgacgcaattgaatatggacaacttaagaatggtcaaagaaatgaagctgttgttttagctgttcggccgatgattgataagttcggtttctaatgctttagttggttatgttgcaattgctgctgggatgaccggttctgcaactgctgcagacatgactgctcatgatattagcacctttaatatgatggcattatatatcccacttgctttggcagtcttatcaatcgtagtctttttgactaaggtaactttatctgaaaagaaacatgccgaagtggttgaagaattaaaagatcaacttgcagaaggtaagattgaaaagaatgaatctaatactcaagttagacctcaagatcagactatctatgctcctgcagacggtaagttaatgaagatggcagaagtaattgacgaagatggtaagccattcccaggaaagggttttgcaattaaaccagattcaggcaatatttatgctccatttgatggtgtagttaggttcacttttggtactaagcatgcttttgaaattgtttcaaataatggtttacaagtagttgttcatgtcggcttaggtacagttaacttgcgcggtgaaggttttgaaacttattatgatgatggtcaaaaggtaaaaaaaggtgacttgctgttagagtttgatcgtaatttagctcttaagaatggctatcaggacactgtagttaccttctatacacaaccaggacgaattgtaaaatctagtgaaattgaagctggtaagattgttgagcatggtgaaaaagtattagatgtacaatttaagtagaggaattacaatgacacagttaaaacgttttttatatggtggggactataacccagatcaatggccagaagatattaaagtttttaaaaaagcggatttaaattctgctacaattaatgttttttcttggagtttgcttgagtcaagagaaggccaatatgatttttcaaaattagataaaattattcaagaattgtctgatgcaaattttgatattgtacttgctacttctactgctgcgatgccagcttggatgtttaaaaaatatcctgatgtagcacgcgttgactatcaaggacgccggcacgtctttggtgcacgacataacttttgccccaatagtaagaattatcaagttttagctagtaaattagtcgagaaaattgccgaaagatatagtaataaccctcatattgctgtttggcatgtgaataatgaatatggcggcaattgctactgtgaaaattgtcaaaatgcttttcgtacttggctcaagagtaaatatcaaacactagataacctgaatgaggcctggaatatgaatgtgtggagccatactattcatgattgggatgagattgttgttcctaatgagttaggagacgcctggggaccagaaggtagcgaaaccattgttgccggtttatcaattgattatttacgttttcaatctgatagtttacaaaatctttttcagatggaaaaatcaattattaaaaagtatgatccacatactcctgtaactactaatttccatggcttacctaataagatggttgattatcaaaaatgggctaaagatcaagatattatttcttatgattcttacccaacctacgatgcacctaagtatttaccagcatttttgtatgacttaatgcgtagtttaaagcatcagccatttatgttaatggaatctgcaccgtcgcaagtcaattggcaaccatatagcccgctgaaaagaccagggcagatggcagccacggaattgcaagcagttgctcatggtgcagatacggttcagtttttccaattaaaacaagcagtaggcggctcagaaaagttccatagtgccgtaattgcccactcacaaagaaccgacacgagggtctttcatgaactagaagatttgggtaaaaaattaaaaaagattggcccaactgttttaggctctaaaactaaggctagagctgctattgtatttgattgggataacttctggtcatatgagtacgttgacggtattagtcaagattttaattatatggaatcaatcttagattattatcgccaattttatgaacgcaatattccgacagatgtaattagtgtcgatgatgattttagtcaatatgatttagtagttgctcctgttttatatatggttaaagcagggctaagcaaaaaaattaatatttatgtcaaaaatggtggcaactttgtcactacctatatgtctggaatggttaacaatagtgataatgtctatcttggtggctatcctggcccgttaaaagacgttatgggtatttgggttgaagaaagtgatgcaattgtaccaggacataagacaactgtttcactaaatggcaaggattataaagcgagtttggtttgtgacttgattcatccagaaaatgcaaaagttttagcaaagtactccaatgagttttatgcaggaacggctgcagtcacggaaaataaatatggtcaaggtaaggtctggtatgttggtactaagttggatcacattgggttgacgcagctattcaaccatattgttttgacagctaacgttgaatcattggtgggcgacagtcataagttagaagttactaagcgagttactcagtctgggcaagaattatactttgttttaaatatgagtaatgaagaaagaaaattgccacaaaaatttgtagagtatcaaaatattttaactggtcagcaagctcatgatcaaatgaaggcatgggatgtacaaatacttgttaaataaatgattttttccttaatgaagacaagaagttagacaaacgatctagcttcttgtttttttacttaaataaatattttatttatttaagtaaactatttactaaaagataatgaagagatatactaataactgaaaacgattacagaataaatttgaggtaaaaacaatgaataaggaagaattacttaaagaatatgagacaacttttggtgaaaaaggtaaggatgtctttttctcacctggtcgaatcaacgtgatcggtgaacacactgactacaatggtggtcatgttttcccagctgcaattagtttgggtgtttatggtgtttacggcccaagagaggataaaaaagtttgcttgttttctggcaatgttgatggcgatatcgtggaattcgatattgacgacacaactgttgagaaagatgatcgcttttgggctaactacttcaagggcatgattacgtacttacgtgaaaaatatgacaacattgatcatggttttaatctttatatcaaagccaatttaccatcaggttcagggctatcatcaagtgctgccattgaaatgctaatgggcatcattttaaaggatgaatttaacttagatgttgaccggattgctttagccaagatgggtcaaagaacagagaatgaatttgttggcttgaattcagggattatggatcaatttgcctgcattatgggtaaaaaagatagtgctatcttcctcgattgcaatacattagattatgagtataagccactcgctttaggcgattacgaaattattattatggcaactaacaagccacataccttagccgattctgcttataatgatcgtgttcgtgaatgtcatgatgcagtgaagaagttgcaggctaagttagatattaagactttaggtgagcttgataatgatacttttgatgaatatgcatatctgattaataatgaaactgaaattaagcgtgctcgtcatgctgttagtgaaaaccaaagaactttgcgggcaacaaaggccatgcaaaatggagatttggaaaaattgggacgtttgattgatgcttcacacgtttcacttcattacgattatgaagtaactggtcaagaactagatactttagctgaagcttcatgggctcaacctggcgtcttgggtgcaagaatgattggcggtggcttcggtggtagtgccattgcaatcgtcaagaaagaccaagctgaggcatttaagaaaaatgttggcaagatttaccgcgacaagatcggttacgatgccagcttctatgatgcggaaattgttgatggaactaagagaatttaatcagacaagaggataagtatgaaagttattgaaaaatttgcggatgaagttattaatagtggagcgtatgagccgctcgatcgcgtatatgtgattaacaaaattcgcgctttagttggcgatgaggcaagtagcgttgaagctaatgatgaacaaacttcagttaagcaattagttgatttagccgtgcaaaataaaaagatttcggatgatgttacttcacgtgaagttttgaatgatcaactatacgacttgataacgccaacaccatctaaaactaatggcatcttttggcaaaaaatgcaaaaatcacctgaaaaagcaacagattggttttataaactttgcgaaaacaacaattatgtcaaaaaggaagcaattgccaagaatgttgtattctcagggaccagctctaaaggacatggcttagaaattacaattaatttgtccaaaccggaaaaggatcctaaggcaattgcggcagcagctcatgcaactggtaagaaatatcctcaatgtgcactttgcctagaaaacgagggttaccttggtggatatggcaaaaatgctcgttcaaatttgagaattattcgcatgaatattggtggccgcccttggggatttcagtattcaccatatgcttacttcaatgaacattgtattttcttagatcaaaagcatattccaatggtcatcaaccaacaaactttgattaatttggttgaaattgaaaagacgttaccacattattttgttggttcaaatgctgacttgccaattgttggtgggtcaatgttagcacatgaacactatcaaggcggacgtcatacttttccaatgatgaaagctaagattaagaaaaatgtagtctttgatgattatcctgaagtggttgctggcattgttgattggccaatgagcgacttgcgcttgattagcgataattcgttagatttgattgaattgggcgctaaaattattaatttctgggatcattattcagattctgctcgtcaaattaaggcttttgatggtaaaacacgtcatcatactgtgactccaattatgcaccgtgaaggcaagaacttcgtacttgatctagttttgcgtgacaacaacactagtgaaaattatccgttaggtattttccacccacataaagaattgtggcatattaaaaaggaaaatattggcttgatcgaagtaatgggccgtgctattttgccaggtcggttaaagagtgaacttgaagaagttaaaaaatactggttgggccaagataataagatggctattagccacaaagaatgggccgatcaaattaaagcagagcagaatattactgccgagaatgttgacgctgtgatgcagcaagctttagttgaagtctttgaacaagtattgcaagatgccggtgttttcaagaataatgcagatggcgatgaaggctgggataagttcattaccgctttaactaggcagatttaactcatcaatgtgtaaaacgagatctgttggatctcgttttttttgttagcggtaactcatatattctgatggttaaataatttataatatttatgaaagcgaatacaaaagaagggcaagagtatgaagacaagttttagaaaatatggcagaaaagataataaagatctttgtgaaatcacactagagaatgatcacggtatggtagttaaggtattgaactatggtgctacattggaaaaggtgttgcttgatggtgagaatatgattttgtcactggataagccagaagattacgacaaggagcgtaattatctaggcggtacggttggacgtattgccggaagagtgagacgaggtttatggcggcacggcttagaattacatcaattaccaatcaatgaagggcctaaccacattcatggtggtattgggactgatactgaaatttggaattttagacctagttgtaatgaaaaaggtgctcgtgttgatttaacactttttgatccagatgggtataatgattatcctggtaatttaaaattacacgctcgttatgagttagataataacaatattctgcattattcattgggtgccatgagtgataagctgactatttttaatccggttaaccatactttcttcacattaggtgaaaagaaaatgattaatgacttgcaactgcaaatgaatgctgattattatattccagttgatgagactggcttgcctgatcgtggtatggaaaaagctgatggaacagcattcgattttagaaagaagaagcgagttggggatgcattggaagctgatgatccgcaaattaagaaccgcgatggaatggatcatccatttatcttggatggcaatatgccaaatgcagtgctaacttctgctaaacacaagttaacggtaacgactaatgcgccatctctgattctgtacactggtaatggctttgaccacactggcaagtatacagctgactttggtccgtattgcgggattacttttgaagcacaagtgccgccagcagaaggtgatgatttgggacgcatcacgcttttgccaggtgaaaaatttaagcggactgttgattggaaatttgaataaaaatatggagaacatccttactgaatgaattggtagggatgtttcgagactgtaaaatagtttgtgtaaggatgaatgattccttaaatttatttctttaaacattagaaaaaggagttcctttctcgtatgattggtttgaacaaaaaaacacatacagaaagaagaactccttcatgaatgattttaccaaagattttgctcaagctctattcaatccagacaaaataaatgatttattgcgcaaagagctacaacaggctgttaataacttgttagaagctgaattgactgcctttctgggctatgatccctatgccagaaatggctggaatactggcaactctagaaatggtgcttatttccgcaaagttgatacgcaatttggcccaattgaagtgcaagtgcctcgggatcgcaacggtcaatttcatcagcacacgctgcctggctacaagcagcactcggatatcttggaaagcatgattatcaagctttactccaagggcgtgaccaccagggaaatagccgatctaattgaaaagatgtatggcagccattacagtccagctcaggtatcaaatatttccaagcagatgattccaaaggttgaggcttaccacaaacgcaagctaagcgacaagtttttctgcgtctatttggatgcgacataccttcctttgcgccgagaaacatttgagcgtgaagcagtctatattgccattggcatcaagcctaatgggcacaaggaggtcattgactactgcattgcacctagcgagaacattgaagtctggacagatatgcttcaaaacatgaaatcccgaggcttaaagcaagttgagctttttctttctgatggtgttgttggcatgaaaacagccttggccaggacttatcctaaagctcattttcaacgctgtttggttcatgtcatgcgcaatatctgcgctaaagtacgcgtcgacgatcgtgaaaagatcatgaacgaattcaaacaggtgcatcaacagacaaacaaagaagaagccacagctgtcctgcatgacttctataccaaatggggcaaggtttacagccatgttatcagaagcttgaaagacatagaaccagatctgctggtcttttataactatcccaagcagatcagagcttcaatttattcgactaacatgattgaatcatttaacaatgtgatcaagcgcaaagctaagcctaaggcagagtttccaactgaacagtcgcttgatgcttttattggcattcaggcaatgagctacaatgaccgttatttcaatcgaattcataaaggctttggtcaggttcaggacaccttagaatcctactttgattaaataaataattaaaaaatcaatttacgagaaagatctatttacacaaaagatttgacagtttcgatgtttccttctttggatattatgatttgattttacaagtaaatccatattaatatttaaaatatttagaaatcaactgaaaggtatagtaaaaatgatgacaaacgaaaagattattgctttagtcaaggaagaatatctaaacaagattccaaaaatttttcgcaagcatgctgttgaaggcacttgcaagttaatcgctagagaacatcccgatttatacaaggcttttgaagatggtgaaccaaccgcagaagaaaaacaacaaatgacagagttgattaacgggattttcgaacagagaatgaaaaagcataagatgttataaaaagacgctggaatgtaatgattattagatcgctacattctagcgtttttttgattttaattttgatttattaaactaacaggtagcgtataaacactttctaatgaaacagagggatcattaatttgacgtaaaagtaaatcgcacattaattcagcaatttcttttgtatgttgccgagcactaattaaatttggaaaaagactttgaatcaaatgactaccatcaaatcctgtgattaaaggtacttttcctaaataatcagcacattctttagctagtaaagctgtaatgtcatcggtacaacaaattgcatcatattcgtcatcctttaaaaattgaaggatggctatttttttagcaataattgagtcactggcactgagtgagcgaagatcgaatttagaatcaaaagtgttaaatacgcgaatcattcctttgattcgatcacttattgggtaatagtcttctttagcaccagcaataataataattttctttttcttttgttttagaacagattgtgcgatttgcatacctgcgtcatagttattagattgaacagttggtatttgaggactaagtttacggtcaaagctaacaataggaaactttatttttagtccttttttaggaatcttaataggagagctggtgatcagtccagcgatttccttttgtttaaatcgctctaaatagtaattaatatcttgggattgatagtgatctagatgaagaatacaatcgtatcctttttcctgtaaataaaaggctagatattcaaataattcagaataaaaaggattattaatttttggaaaatcaacctcaattaaatttaatttagatgtagtattgactgtattttttgttttgtagcctaatttttttattgcttctttaaccttaagagcagattcaatacctacatatccattttgattaatatatcttgaaactgttgctatcgaaacgtttgcttctttagctatatctttaatagtaactaccatattttttcacttccttatgtaaatattacacatttaaaatcctatatcatagtattttgatttatttaaatgtgtaaatttgtgtaaatccattgaaaactgtaaatagaagtgtatgatgtaattgtaaatatgatagcgcttacttaaagagagcgatatttgatcaagaggagtgaagatttatgaaaaagtggctaaaaagaatagctttaattagcttagtcgctacgatggctttaagtttgacagcttgtggtcaaaataaaagcagcaattctggtaaaaaagtgacaattgagtactttaaccagaaaaaagaaatgtcagcaactttgaaagaaattatcaaagactttgaaaagaaaaatcctgatattcatgtcaaagaagttgacgttcctaatgcaggtacggttttgaagacaagaatgctttcaggagatgttcctgatgtaattaatatttacccacaaaatattgattttcaggaatgggcaaaagcaggttattttgaagatatgactcatgcttcatatattaaaaacattaaaaatcactatgctgattcttttaaaattaacggtaagatttacaacgcaccacttagtgccaacgtttacggtttcttctataatgcaactgaatttaagagattaggaattaaagctcctaagacttgggccgaatttgaacaaattgttaaaaaaatcaaggctagtggcaaggcaccatttgctgtagctggtactgagccttggactttaaacggatatcaccagttatctttagctactgttacaggtggtgctaagcaagctaaccaattacttaggttctcagcgcctaacggcattaaagtaaacaatccttatgttcaaaaagattttactagattgaacttacttcgtgaaaatacacaacaaaattggcgtggtgctagttacaagaaactgtcaaatcttttgtgtaaatagttctttctcgtaaattgattttttaattatttatttaatcaaagtaggattctaaggtgtcctgaacctgaccaaagcctttatgaattcgattgaaataacggtcattgtagctcattgcctgaatgccaataaaagcatcaagcgactgttcagttggaaactctgccttaggcttagctttgcgcttgatcacattgttaaatgattcaatcatgttagtcgaataaattgaagctctgatctgcttgggatagttataaaagaccagcagatctggttctatgtctttcaagcttctgataacatggctgtaaaccttgccccatttggtatagaagtcatgcaggacagctgtggcttcttctttgtttgtctgttgatgcacctgtttgaattcgttcatgatcttttcacgatcgtcgacgcgtactttagcgcagatattgcgcatgacatgaaccaaacagcgttgaaaatgagctttaggataagtcctggccaaggctgttttcatgccaacaacaccatcagaaagaaaaagctcaacttgctttaagcctcgggatttcatgttttgaagcatctctgtccagacttcaatgttctcgctaggtgcaatgcagtagtcaatgacctccttgtgcccattaggcttgatgccaatggcaatatagactgcttcacgctcaaatgtttctcggcgcaaaggaaggtatgtcgcatccaaatagacgcagaaaaacttgtcgcttagcttgcgtttgtggtaagcctcaacctttggaatcatctgcttggaaatatttgatacctgagctggactgtaatggctgccatacatcttttcaattagatcggctatttccctggtggtcacgcccttggagtaaagcttgataatcatgctttccaagatatccgagtgctgcttgtagccaggcagcgtgtgctgatgaaattgaccgttgcgatcccggggcacttgcacttcaattgggccaaattgcgtatcaactttgcggaaataagcaccatttctagagttgccagtattccagccatttctggcatagggatcatagcccagaaaggcggtcaattcagcttctaacaagttattaacagcctgttgtagctctttgcgcaataaatcatttattttgtctggattgaatagagcttgagcaaaatctttggtaaaatcattcatgaaggagttcttctttctgtatgtgtttttttgttcaaaccaatcatacgagaaaggaacccctttttctaatgtttaaagaaataaatttaaggaatcattcatccttacacaaactattttacagtctccaactttagataaattacttgatcaaatgatgacgcaatttgagcagttaaataaaaattatgaaaaaggacatggagaacgtctctatgaacatttacgtggtcgggtaaaaagtgaagccagtatggaaggcaagtgcaaaagaaaagatttaccgttaacgccacaatcagctttgcgtgctaatcgagatagtgttggattgcgtgttgtctgcaattttattgacgatatttatacctgtattgactttattaagcagtgggataatgttaatgtttatcaggaaaaagattatattactaatgctaaaactaatgggtatcgttcatatcatatgatttttgacgtgactgtacctgatgaagatgttgacggcaatataccgggtcattattttgttgaagtgcagctaagaactatcgccatggatacttgggcaagtctagaacatgaaatgaaatacaagcacaagattaagaatcctgagatgattggcgaagaattaaaaagagtagcagatgaattagcttcttgtgatgtatcaatgcagacgattcgacaattaattagggaagaggattagtaaattaatgaaaattttagtagcagaagatgaaccacagctattgcgtgttttaaccgttgccatggaacatgctggttatgatgttgatccagtggacaatggactaaaggcagtagaacatgctaaagaaaattcttatgacgtaattatgttagatatcatgatgccagtcatggatggaattactgctttgaaaaagatccgtgagagtggcgacaagacttatattttaatgttgaccgctaaggccgaggttgatgaccgagtaactgggcttgatagtggtgctgatgattatttgactaagccgttttcacttaaggaattgctagcacggctgcgttcaaaagaacgtcgagaagatgattttacacctaataaattggaattaggggatgtaactttaaatgtatctaagcaagagttagttagtcataactcaattcgtttgagcggaactgagactcagttgatgaattattttttattaaatcaaaataaggaattatcaacggaagaattgcttaatcatgtttggaaaaatgatattgatgcaaacgctgatgtagtttggatttatatttcatacttgcgacaaaaactgcaatcaattcaaagttcagttcgaattgaaggcgataagggtgactcgtataagttagttaagtaggtgagcagatgattcaaaaatttcgttggaagtttattggtacttctgttgctgccttatttgtagtcctattgttgaccttaggcggcttagtttgggtgactcatgttcaaagtcaaaatgaagtagatcgggtgctgacagctttagttaaaaatgaaggacgtttatcacctaaaaatgccaagccagcttttggtgaccaacgcgatccaattaatcgcaattttttaggtgggcaatataatcctgaagcggtttatcagtatcgctattttgcagtaatgattgatgaaagtcatcgcgtacatgtgatcaacgataataatgtttacaaggttaataattctaagattcagaatattaccagagcagctttagaaaatggagacaaaagcggtgtagtcgccctagggcaaaatcaatatgccttcagagttgctaaaaattctactggtgaaacgatgattgtctttttaaatgagaccctaatttttaatcgtttttggttattattcagggtagctttagttttaggattaggagctttgattgtcttcgctttagttttgattttagttttaggtaaagcaatcaagcctactgttgatgcttatcataagcagcaggagtttattactaatgctggtcatgaattaaaaacaccattaagcgaatacagaaatggaagagatgcttggcaataattctgaatggaatgaaagcaataaagagcaagtagcaaaattaaccaaattaattaatcgtttgatttcgttagctcgtaccggcgagatgggtgaacttaccttaagtaaaattgatttttcaaaaattgttgaagaaacgactaaagattttaaatcagtcatgaagaagaatgacttagtttatcaagtatcggtgcgtgaagggctgaatgttttagctgaaaaacatactttagctgagatagttaacatcctattggacaatgcccagaaatattgtgatcctcatggcaagattcaggtaaaattgactaaaggtggtaccttaagtaaatatgcagttttgcgggtagaaaatacttatcgtgaaggtaaaggcaaagactatagtcatttctttgatcgcttttatcgtgatgataagtcacataattctaagaaaggtggctttggcattggtctagccatggcacaagaattagtggaagcttttcatggtaaaatttcggcccaccataaaggtgaagacattgtttttactgttagtttaaaaattgctaaatgattattctgtgatagttgtataattagaacagaattgggggatcattttggcgaagagaaaatcaatttataccaaagatgttgtcctggttatggcagcatctttcttttttatgtttagtacaatgtttgttaatcctttgattaatggatatgctaaagaattaggcgctagcagtgcttttgctggaatcattgtcgggattatgagtttagcagcaatgtttttgcgaccggtagctggcaatttaaccgataaattttctaaataccgcttatcgtttattggcggcgctttaatttttgtaggagtaatgggctacgttttgactccgtcaagtggttggcttttgctctttaggttaattaacggcaccggttatgtcctgtgcacagtttgtatgactacctggcttgcttttttagtgccgcgccaacatgttggtgaagcaatgggcttttatggtttaatgaatgctttggcaatggcgttagctccagcagtttcgattaatatttatcaaaaaataggttatcgaacaagtttggtggcatcagctgtttcagctttactaatgattgtagcaattcagtttgtgggtgataatgctttgcctaaaaagcgcgtccgaacgcagaaaaagagtttcaaaattattcaatttaatgtcctaccggtggcaattttgacaactttatttgctatcccgtattttgtaacacaggcagatattgtaacttatgtagaacaaaaacatctgactgtcgcagttggatcatatttcttgatctatgcggttgttttgttgattattagagtaggactaaaaaggtattttgatacagtacgttttggcgtctggttttggctaagtctagtttcaacggctacttatattatcttgctcgcaataatgaataatgattggcaaatggctttagcggcagctttaatggcgtcaggctatgggatcatttattcagttttgcaatcaactgcgctgttgttagcaccgattgaagaacaaggcttagctagtgctactttttatttaggattagatattgctatggcctttggcccgatgatcagtggtgtaattgattctgctttaccgatagaatggttctatccagtagaattagtcttagttccattgattttagtagtttatttcatttggcgtaagcgtttgaatggcgcaattgaccatcattagagggaaaatatgagcgaatatgtagttaaatctaagttagaagataaagaatggcaaattgccaaccaagtacgtgatcatgtttttgtttgtgatgatgttaaacatgatgcaggtcccaacccagttgagtatctatgtggtagtgttaattcatgtattgtgatgtcggcagggatgattactaaagcacatcaacttgatgttaaaaattttagggtagaaaatcaggcacaaacggagaatctgggccatggtaaatcagtagtaactgagatgaagatcaaggtcttctttgattcgacaatgactagagccgagaaggaagaatttttagctcacactttgcatgtttcaactgtttatcaaactattaaagcagctgtcaaaatttatgtggaattaggagaataagcgatgagcgagccatattacaaacaagaataccagggtgaaagaaagttagatggtgaggccccagtttttagttttgatcaaattatgaaaaaaacttttctgcgaccatttatctggaatgcaagaactaccagaagaagtttctggattggaatcgttattactgaagttataatttggattggtggaattattacatttttggcaactgttatgccagtttctcactatgagaatgattcagctgatatgataaatggttttgcttttaatggtgatcacgcttcgatgattgtcattatcggcatgatcatttggggcttgatctatctttatttgaaattatgccaattaggcctagccgtaagaagattgcatgatatcaattatacaggttggcggattctgttaatgctgataccgttaggttggatttttgttctgtattttgcaattcagccaagtaaacaagagccggtgaaatggggaacgtatctttaccttgacgaataataaaaaatgttataattgaactataagagattacgttaggagattatttcgatgaaaactaagaatttatttacttcattagctgccgcagtgatgctttcagctggtttagctggtgcaggtgtgtctgctgcagaaccagttcatgcagcaactacacaaacttcaagcaaaaaaggtaccattagtattaagcgtagatcagtatcagctacagttaataatgctaatcctaagctttacgctgtaaaccaagatggtaaaatcgtaaagtcaatggattcaaattatactaaaggtcaaaccatccagctttacttctctaacgaggctaagaacgatcaaggttctgttactttctattatgttgacagtcaaactgtagatggacaacaatgtgcaatttatgttgtttcgactgatgttaccccttcagcaacagttccaagtcaagcagactggtacaagcaagcacaaagtgaccaaaaagccattcaagatgcttacaataatagagcattaaagtacatcgttgtttcacctaagtcaaaaaagggtgcaaagatctactacgcatataagaagagtgctaaggctaaaaaggtttactttaaggcaaccaagaagaagatcaagtacggtaagaagtacaagtcatcgatgatcgttaaaaacggtaagagcagatatgcttatattggtaagaagagatacttaaagacctctactattaaagtagtaagtgctaagtacgcaccagttcaattatcagatgatttgaagaacttaattgttcaaaactagaaaaagttaataaaaattgtagcgtaaaggatgaattattgtcctttacgcttttttgatctaaaaattaataataatattgataaaaaatctcactgacctacaatagactttgcgttatttttagggagttgtaaaaataagaatgaagagagtaaaagtctatttaggattagcttgtttgatgacgttattatgtttgaagccgcaagtggtttgggctcgagaactaaatccatttcagactaagatgattaatccgcatacgtcttatagaatttatcaaaacttaactcgtaaaggtccgtcaagaagtctatgccttgctaatacgtttaaacatggcaatgttcaagccagtgcagttagaaaagttcgcggcaataagtattgctatgtttggttagacggacatagaggcggttgggtcaatcagcgagcttttttaagaagaaaaattgcagttgtacatcagattagtttagtgaagaattcgcattatagttttccaactagggatgcgattaattatgcaacagatgcagcaggaacggtaattgagccaagtaaagttaaagtatctcgagcagaagtttcatcaagtaaaaaggaaagctatcgggtaagttattcttatggtaaagctcatgctcagacagttgttcaagtgagagctaatgctagagagggcattgttaaagcaaccaaaaaaaccacaagctggagacagtgctcgtagctggttcaagcactataagacgtctggtaattggggtagaagctttgctccggaaactagaccgcatgttttgaaaagtggacattttagactgaaaacctatttctatcaacctgcgactttatgtcaaagtgattcggtaactggaacggtgggaccagtaccagaagggcttactgtatcaaatggttcaatgtatgccacaatgtatcattcacctaatgatacgcgtgctcacattgtttcttacaaatttaatcaagtgcctaatcgctatactatgcaaaagttgccatggctaccttggtcacaatttctgcggcttgtatcccatgttaagacaagcccatatattaaattgggacatggacaagcaatcggttcaactcgaaagtatatttatgtgattgctaataaccatttattgcgcaagagctctcaatcagaagaaattatgcagattagtaaaaacaatttgcaaattaaacagatttggacttttaaagtttggaatcattcagctagaacaggtcgttatttccataatgctacttttgtaaatgatcaccaatttattgccgtttaccgtgatgccacagaccaccgttttgaatattgggaagttactcgtcagggtaatagttggtatcctaaagagattggcgctactagaggagattttatgcgcaatgattctcccgttcaaggaattacctatgacaagcataaaaaacagatttatttggcctttaatgattatttgtttaaattgaaacgctcaggtaaagtgctggctagaggtcactttcatacagggcgtgaatttgaggggattagcataaatggtcgtcatttatacgcagagctggcgcaaaggccagaattgttgaggcagaggataagataataggtgtaaaaatatgttatacccagataaattctatttaacacaagatttaaatagaagatttgccagaactaaccttgctcgactaatatttagtgatttgcattttgagaaaacaaatatttctttaattcaaacacaattagttgctgatgggttaaatatagagagggcttccgagaaagataaggaaagaattattcgattaaaacgagcatggcaatatattattaatgaaaataaggtgttatctttagatattgaactaaagatacatttattactgacaggctatggcttccgagataatctaaactacaaacaagaagaaaaatttttcgatgagttaatgaacaacgatacctcgactacagataaggcaatgacattgatgtatcataatatgcgtaatcaattattctggggcggaaataagcgtactgccacactagctgcaaataaattaatgattgaccatggagcaggtttaattaatgccccacttgataagtgggatagatggaacaagctgattagtcaatattatttaaccggcaaaatgaatatgttaaaagattggacctatgaaaatggcattcaaggagtagtgctgaataataattcagatttacctaaacctgatattaatccagaagattatgattaattacttaagcagaccgaataggcctgctttttttgtgtgcaaaagctctttttgaaaatatcatgataaaagttcataatagaaattgtttgtttatgttaaaggagttgttttattttttatgaagaataatgatcacgttaagataagtcctagtagtcttgtcttgatgattttttcttctatttttggatttagtaattcactgacagctttttatcaaatgggttattcaagtatcatttggtatattgtcacagctattttattcttcctgccatcagccttaattttcgctgaatatggtgcttcctttaaaggaattaaaggtggaatcttttcatggcttgaaggatctactaatgaaaaagtatcatttatcggaacttttatttggctggcagcttgggtaatttggttagtttcatcaacccaatttttcttagtttcagtttcaacggcaatttttggtcatgatactaccccaagctggcatttagggtcgctgacttcaactcagttattaggtgtgttggaagttattttcttagtaattgttacattttgtgccgcaaagggaattgataaaataaaggcgattaataatattggtgggatctttactttaggaattgccattggttttacagcagtttcactttttgtctttattttgaatcatgggcaattagctgaaccagtgaccgcacaaaatatggttcattcacctaatccagcatttcagtcaccgattgcggttatttcatttattgtctatgctttatttgcctatggtggtctggaaacaacctcaggagtaattgattcagttgataaaccggaaaagaattatcctaaggctctgattacggccatggtcttaatgacagcactttatgttgtaaacatctttatgtgtggggtggctgttaattggaacaaatcgttaggtggtaaaggtgttgacttagctaatgtcgaatatgttttgattaataatttaggtattgtcactggtcatagcctaggtctatcacattctacttcactggcaattggaactgtcttttctcgtttggccggaattgcggatgtgttatcaggaattgccgctgcctttttgatggtttattcaccgattaaatcatttattgaggggtgtgatccgcgactattgcctaagaaaatggttaagttaaataagcacaatatgcctgaattctcgatgtgggtacaagcaattgtggttagcgttattatcttatttatttcatttggtggtaatggagcacaacaattctatacaattttaatggatatgatgaatgtttcttcatcagcaccatatttatttttaattgctgcttacccattttttaaagctaaaaaagacttagatcggccatttgtttttattgaaggtaagaaaaaagtttgggcaacgacaattgttgtttggttagtggttgcggtcggaattatctttacttgtatagaaccactctttaccggagactggcaaacttcattctggacggctattggtccagtggcctttggtgttattgcttggatttattacgcatataatgaacgaaaagaaaaagcaatggcttaatacgcaaaataagacgaaggattttgtccttcgtcttatttcttttctctattttttactttaagccagctactctgacaacatcacgttcaatcattaattcctcattagttggaataaccataccaacaatagttgagtcgggcttggtaataatggtggcattttctttattagcggctgaatcaggcttaaggcctaaaagttcgagtgaatccatgacatgttcacggacaccaaagtcgtgttcaccgacaccagctgtaaaggcgataccatctaggccacgcatttcaagggtataagcaccaacatagcgaatgattcgattaatgaaaatgtttctagctaagtcagcacgcttcttcttttccccttcgagcttagtcatgtcaccacgtaaatcacgcatatctggtgaaatgcctgaaattcctaacaaaccagattcgttgtttagaaccttaagcatttgatcagcatcaagattttcctttttcatgacaaaagcaagtaaagaaggatcaacatcacctgaacgggaactcatcgtaatacccgccattggtgaaaagcccattgaagtatcgaatgatttaccatctttcacagcggtaactgaagcaccagatcctaagtgacaaacgattaatttcaagtcctttaagtcgcgtttcataatttcagcggctttttgactaacatatctaaccgaagtgccatgtgcgccatattttcttgcaccgtatttttcatagtatttatatggaagtgagtacaagtagtgcactggatccaaggtttggtggaatgaagtatcaaagacagcgacttcagggacgccaggcaatactttcatgaaggcattaatgacatcggcttcagcggtattatgaagcggcgcatattgtttcaaatcataaatcttttgtagtgacttttcatcaattaaggtggagtccttaaattcttcaccacccgcaacaattcgatgtccgattccgatgatttctttaggatcgtcaattaaatcatacttttttaaattttcaagcaagattgtaacggcagtttcggaatcaggaatgtcaactttttcttggtgtttttcacctttaaccttgattgtaaaggtggagccgttaagcccaactcgatcagccatcccttcgctgataactttttcatcaggaaaggtgaaaagcttaaatttaaaagaagagctacccgaattaatcgctaaaatttttttcataaattatgcctctttttcttaatttttgcagtgcaacctatccagtaagggcatgcaataaagaaaatgccactaatctgctttaagtaagttcttgcagtaatagtgtcaacgtctttattatacaacttttgctgtaagctcttacagatatgaaactgtcaaatcttttgtgtaaatagatctttctcgtaaattgattttttaattatttatttaatcaaagtaggattctaaggtgtcctgaacctgaccaaagcctttatgaattcgattgaaataacggtcattgtagctcattgcctgaatgccaataaaagcatcaagcgactgttcagttggaaactctgccttaggcttagctttgcgcttgatcacattgttaaatgattcaatcatgttagtcgaataaattgaagctctgatctgcttgggatagttataaaagaccagcagatctggttctatgtctttcaagcttctgataacatggctgtaaaccttgccccatttggtatagaagtcatgcaggacagctgtggcttcttctttgtttgtctgttgatgcacctgtttgaattcgttcatgatcttttcacgatcgtcgacgcgtactttagcgcagatattgcgcatgacatgaaccaaacagcgttgaaaatgagcttttggataagtctgagctaaggctgttttcatgccaacaacaccatcagaaagaaaaagctcaacttgctttaagcctcgggatttcatgttttgaagcatatctgtccagacttcaatgttctcgctaggcgcaatgcagtagtcaatgacctccttgtgcccattaggcttgatgccaatggcaatatagactgcttcacgctcaaatgtttctcggcgcaaaggaaggtatgtcgcatccaaatagacgcagaaaaacttgtcgcttagcttgcgtttgtggtaagcctcaacctttggaatcatctgcttggaaatatttgatacctgagctggactgtaatggctgccatacatcttttcaattagatcggctatttccctggtggtcacgcccttggagtaaagcttgataatcatgctttccaagatatccgagtgctgcttgtagtcaggcagcgtgtgctgatgaaattgaccgttgcgatcccgaggcacttgcacttcaattgggccaaattgcgtatcaactttgcggaaataagcaccatttctagagttgccagtatttcagccatttctggcatagggatcatagcccagaaaggcagtcaattcagcttctaacaagttattaacagcctgttgtagctctttgcgcaataaatcatttattttgtctggattgaatagagcttgagcaaaatctttggtaaaatcattcatgaaggagttcttctttctgtatgtgttttttttgttcaaaccaatcatacgagaaaggaactcctttttctaatgtttaaagaaataaatttaaggaatcattcatccttacacaaactattttacagtctcacagatatttttttattactaaaatttatatataaatttgattgatcatatataaatttagaatatcaatttgcaacaaaaccgcttacaaactataatgaaattaacatacaatatatattgagaggagaaaaacgaatgacccactactacgaaggctttccacaaagtgaccgcgatgaaaaaatcaagatggtgaatgtggatgaacttgaagaacgtgttaagaaggtaatgccagaaggtgcatattattatattgcttcgggtgcagaaaatgaatggacctggcgtaacaatactgctgcttttaatcattttcaaattgtacctcgtgctttgactgagatggctgatccgcaaactgatactgattttatggggatgcacttaaagacgccaattatgatcgctccaattgcttgtcatggaattgcacataaagatgcggaagtcgcaacgcaaaagggtgctgctatggctggtgcgctctttagttctagtacttatgctaataagagtgtagaagaaattgcagctgcagctccagaagcaccaaggtttttccaactttatttgagtaaagactggaattttaatcagatggtttttgatgcaattaaaaaagctggttatcaaggcattttcttaaccgttgatgctttggtatcaggttatcgtgaagcaaacttgcggactaactttacttatcctgtaccattggacttctttaagcgttaccttggtgcaaaaggtaaaggtcaaagcgtagctcaaatgtacgcttcttctgcgcaaaagattggtcctgaagatgttaaaagaattaagaaagaatcaggtttgccagtctttgttaaaggtgttatgtgtgctgaagatgcctataaagcaattggagccggtgctgatggaatttacgtaactaatcatggtggtcgtgaagttgatggtgctcctgctaccattgatgttttgccagaaattgcgcaagcagtaaatcatcgggtgccaattatctttgattcaggtgtccgtcgtggctctcatatctttaaagctttggctttgggtgctgacattgttggaatcggttgcccatatctttatggtttagccttaggtggtgcgcatggagttgcttcagttattgaacaattaaatgatgaattaaagattgatatgcaattaacgggatgcaagacaattgatgatgttaagcatgctaaattgacgcacattgcttatactgctgataatttgccatctaatactgatccaagcagacgcaaggaatatccggtaactgacgaaaatcaagttaagcaaactgatgcggtatctggtgcttctaagttagaaggaaagccagctccggaaccagagactgataccacaactggtgcttcagtaagataaagcaaaaatataattaatattttcaatatgattgtcattgaataaatgatagtcatatttttttactatcaagaactcagcggctacaatcaaggtgaaagcgattcgatttttggagaggaaaattaaattattgaagagaataatgttttgactgatactgaagagcttaaaatcttgagtgatcttgttgcaataaaatccgttaatgataatgaaattttagtagcaaaatatttacaaaaactattaggagaacatggaattagttcacgtttgttggaatattccacaactcgcgcagatttatttgctgaaatcggaacaggccatcccattttagcaatttgtggtcacatggatgttgtttcaccaggtgaattagatcaatggcatactgatccctttaaattaaccaataaggatggtaaattgtacggccgcggagcgactgatatgaagtctggtttagctgccttggttattgccatgattaatattcatgaacaccatttaattaagcatggtagtatcaggctgctagctacttttggttggtgaaccttctggctacagtattgccattgctcataagggttcgatggatactaagttaacttcccaaggcaaggaagctcatagctcaatgcctgaaaagggttataatgcgatcgatccattaatggatttattagttaaggccaacaaggcttttagagaaacagataaaaacaatccagacttaggtaagttgacgttcaatactactgtttttactggcggggaacaggtcaacatgattcccggagaggctaccgcgcaaattaatgtgcggactattcctgagttcaataatagtttggttgaaaagaaattaactgaattagttaaggcagaaaatgcgcaaggagctaaaatcaaaatgtacatctatatgtcggaaccttcaattaaaactgacggtaagtctgaatttgtaaaattagcccaaaaaattggagcaaaatatgcggaaaagccgattccaacagttgctattaaaccagtaactgatgcttcgaatttgattgccgacaaaggacctagctatccgtttgccatgtttggtcccggtaatgacacgccgcaccaagttaacgaatatgttgatgaaaagatgtatttgaactttgtgaagatctatactgaattgtttgtggcctatttgaataaataatttggaaagtaataaagagcctaggcaaaattttagcctagacttttttattgtattttgaagtattctttagccgcatcactcatccgttcaggggtccaaacaggataccagacaaattctacatcaacatttttaacttcagggacttttttaacggctgttgtaatctgcttgatcaaataatcagtcaaaggacaggcaggtgtagttaatgtcatattgatgagacagatcccatcttgatcgaggtcaatttcataaatcagccccaagttgaccacatcgacgtttaattctgggtcaataacttgagctaaatgttcaataatatcgtttttaattgttttgctatcacgcattgtgttacctacgcatctttaccaaaaatttttgctttaattgcttgacctgttggtgtaccagctaaaccgccgattccagtttcacgcagagatgccggcatttgatgaccaactttcttcattgcttcaatacattcatcagctgggattacacttgtacatcccgctagcgccatatcagctgcgataagtgcattaccagcgccaataccatttcttttgacgcagggaacttcaaccaaaccggcaatcggatcacagactaacccaagcaagttagacatcgcaatcgataaagcttgggcactttgttcagcactgccaccagctacttcaactgccgcggcagcacccatggctgaggcactaccgacttctgcttgacagccgccagttgcccccgcaatttcggcattattggcaatcaccatgccaaaaccgccagcagtaaaaagaaagcgaatcatttgctcttcgctgagctgtaatcttttttctaataaaaatagaacgccaggtaaagtgccggaagaaccagccgtcggggtagcgcagacaacgcccatcgctgcattgacttcgttagtggctatggcattttcaactgctgccatcattgtatcgcctgaaagtgtgtgtcctttctcgcgatattttttcagcttaattgcttcgccaccagttaagccagtttttgaaaagacaccgtttccagattcacctcttttaacggcagctcgcatagtttgcaagttatatttcatgcgctgccagactttttctcgtggcaagcctgatagttgacattcttgttcaataattaattcagaaataggtttgtgcgttttttctgctgcagcaacaatttccttaatatggttatacataatattgccctatgttataaacaaataatattctcaaattttttatttagttcttgcaataaatcaggatgaagataattttctacatcatattcataaatattatagtttttagtatgaaaaattcgtttgcgactaaagggtgctttttcgtgtaagagcgcggtaagctcttgttcaatgcgaatatttttgtgtggatcaactaaaataataataggtaatgcaccagcaggttgaatctcggtattatgtaagacaattttgcgaatttcaattgcaccaccaccgatagagcatccagccaattccactttctttttatcattagacatatttaaaatagcagtattagggtgaccaattgggctaggaccatcttcttcaacaaaacgtaaatctacgccgcgctggcgtgcaatctcaggtgcctttggtacgcgtagatcgtctgagtcaaagcctaaaatacctgccgcaatagcatagtctgttccatgaccacggtgagtttgggcgaaagagtcgtaataatgaacggtaactttactcggggtaccgccaaaaagtttgtaaccagcgcgtccaatagcgacggctccggccgtatgtgaacttgatggtcccaccattacggggccaataatgtcaaaaacacttttataccgattagtcattttaatccctgctttgtaagttattctgtttttaattataacgaataataaagaagattaagaaagttttttggagactgtaaaatagtttgtgtaaggatgaatgattccttaaatttatttctttaaacattagaaaaaggagttcctttctcgtatgattggtttgaacaaaaaaacacatacagaaagaagaactccttcatgaatgattttaccaaagattttgctcaagctctattcaatccagacaaaataaatgatttattgcgcaaagagctacaacaggctgttaataacttgttagaagctgaattgactgcctttctgggctatgatccctatgccagaaatggctggaatactggcaactctagaaatggtgcttatttccgcaaagttgatacgcaatttggcccaattgaagtgcaagtgcctcgggatcgcaacggtcaatttcatcagcacacgctgcctggctacaagcagcactcggatatcttggaaagcatgattatcaagctttactccaagggcgtgaccaccagggaaatagccgatctaattgaaaagatgtatggcagccattacagtccagctcaggtatcaaatatttccaagcagatgattccaaaggttgaggcttaccacaaacgcaagctaagcgacaagtttttctgcgtctatttggatgcgacataccttcctttgcgccgagaaacatttgagcgtgaagcagtctatattgccattggcatcaagcctaatgggcacaaggaggtcattgactactgcattgcacctagcgagaacattgaagtctggacagatatgcttcaaaacatgaaatcccgaggcttaaagcaagttgagctttttctttctgatggtgttgttggcatgaaaacagccttggccaggacttatcctaaagctcattttcaacgctgtttggttcatgtcatgcgcaatatctgcgctaaagtacgcgtcgacgatcgtgaaaagatcatgaacgaattcaaacaggtgcatcaacagacaaacaaagaagaagccacagctgtcctgcatgacttctataccaaatggggcaaggtttacagccatgttatcagaagcttgaaagacatagaaccagatctgctggtcttttataactatcccaagcagatcagagcttcaatttattcgactaacatgattgaatcatttaacaatgtgatcaagcgcaaagctaagcctaaggcagagtttccaactgaacagtcgcttgatgcttttattggcattcaggcaatgagctacaatgaccgttatttcaatcgaattcataaaggctttggtcaggttcaggacaccttagaatcctactttgattaaataaataattaaaaaatcaatttacgagaaagatctatttacacaaaagatttgacagtttcgttttttgcaattttaaccgaagttttgtcataataatatgaaaagtgaaagaggttggttaaatgactaaagaaaaagcagaattaaaacaaaatttggagcatctagctgagcaaaagggcagccagcaggcagtttcttatcaagacttgtttacaccacaattgatgcaaaagtatactagttttgctactattgacttttttgtcagagaattgggcgtgaaagactttacgcaaattgagcagatggcgatagatcaagtcgatgaatttgttaaaaaagagaccaagtttgctagctgggaagaaatgcaacaaaaggcggttagcgagtacatgatgaagttattttagcaacaaaaagcgagttagtattaactttaaaactaactcgctcttttatttactatgttaggtgaatgacttgagcacctaattcatcaataaagcgctgatcatgttcaattactagaatagtaggatgatattttttaattaattgaataatttgttcttggttaaagacatctaaatagttcaaaggctcatcccaaagatacaaatttgctggttcaagtaaggacttggctaagtagatctttttttgttggcctgaagacatttgattaattgaattagtgaatatatcacgttcagtacctaatttgtgtaagatattgagaaaatcggcatagttaaggtggtgcttttgggcaaaatcttttaatgataggttattagattgttcaatctgtgataaataggagattgaaatcttatcagctgaatgcaatttgccagtaattgttccagcaaaagtattagtaattgccttaaacaaactagattttcctataccgtttttaccagtaatcacaaattggtgaccacgcattaaatcaaaggtagtaggttggaaaaggggaagcttgtcataagcaaggctaactcctttagcagtaattagatgtttatgatggtcggggacaaaattcatagctaggtcattgtctgcttcaatattttttaaaagaccttttctttcttcgatatttttatctaatcttgcttctacatttttggcaagtttcatttttttggcggctttgtgtcccatgaatcctttatcataaactgtacttctatgtcgaatatcgcctttcatcttggctcccgcatttttgttgctttcggaacgctgggcaaaagtttgcatcttttgttgactggcatggagatttttaatttgcttttctaactttgcattataagcgatattagattcatcctctaattccttttgtttttcataacgagtatagtttccttgttccagcctaattttttgcatttcaattgctagggtgtgatcgacaactttatctacaaaatttcggtcatggctgattacaattaatccttgttttttattatgcagatattgtgctacttgatttcgtgtatcttcatcgaggtgattcgttggttcatctagtagggcaaaagaatgttgattaataaaacaaagcgccagtaaaatttttgtttgttcaccgccactaagtgttgaaaagggctgccaaatgatatcttctttagcatgaagcagatttaattctcgttttaactcccattcctcaaaattaaactgttcttgtaaagcataaatagtaaggttatcgggatcattaattacctgaggatagtaattgaattctaaatcactttgaatagttccttgatattcgacctgttttagcagcattttcataaaagtggttttgccgcgaccattacgaccgattaagccaagtttccaattagaatcgagatttaggtttaaattatcaaaaattttatcctgaccgtcataggcaaatgaaacgttttttagtgaaattgtagacataaaaaagcaccgtcctctcaaactgtgcttatgatctgagaaaatggtgcctgatagattagtccaagttggctaatctataattattcttaatttaaattaaagaaaatcacgcagactaatttctgatcacaagcaaaaagtacatccttaaactagtagaatgcattattttttacttaacgaaaatcagaaattaaaaacgcatcggcgtgattcctcctattacttgaattgattaatctggcaatactttaccatcaaatataattatttgtcaatatttttatgataattcatttgcaagctgtgattaataaggagactgtaaaatagtttgtgtaaggatggatgattccttaaatttatttctttaaacattagaaaaaggagttcctttctcgtatgattggtttgaacaaaaaaacacatacagaaagaagaactccttcatgaatgattttaccaaagattttgctcaagctctattcaatccagacaaaataaatgatttattgcgcaaagaactacaacaggctgttaataacttgctagaagctgaattgactgcctttctgggctatgatccctatgccagaaatggctggaatactggcaactctagaaatggtgcttatttccgcaaagttgatacgcaatttggcccaattgaagtgcaagtgcctcgggatcgcaacggtcaatttcatcagcacacgctgcctgactacaagcagcactcggatatcttggaaagcatgattatcaagctttactccaagggcgtgaccaccagggaaatagccgatctaattgaaaagatgtatggcagccattacagtccagctcaggtatcaaatatttccaagcagatgattccaaaggttgaggcttaccacaaacgcaagctaagcgacaagtttttctgcgtctatttggatgcgacataccttcctttgcgccgagaaacgtttgagcgtgaagcagtctatattgccattggcattaaacctaatggacataaggaagtcattgactactgcattgctcctagtgagaacattgaagtctggacagagatgcttcaaaacatgaagtccagaggcttgaagcaagttgaactctttctttctgatggtgttgttggcatgaaaacagccttggccaggacttatcctaaagctcattttcaacgctgtttggttcatgtcatgcgcaatatctgcgctaaagtacgcgtcgacgatcgtgaaaagatcatgaacgaattcaaacaggtgcatcaacagacaaacaaagaagaagccacagctgtcctgcatgacttctataccaaatggggcaaggtttacagccatgttatcagaagcttgaaagacatagaaccagatctgctggtcttttataactatcccaagcagatcagagcttcaatttattcgactaacatgattgaatcatttaacaatgtgatcaagcgcaaagctaagcctaaggcagagtttccaactgaacagtcgcttgatgcttttattggtattcaggcaatgagctacaatgaccgttatttcaatcgaattcataaaggctttggtcaggttcaggacaccttagaatcctactttgattaaataaataattaaaaaatcaatctacgagaaaaatctatttacacaaaaaatttgacagtttcagattaaatttcttcactactcaattcaaacatattaataattgatttaaacatagataaaagttgtttaactattaaaaatgaattttgtgaatataatgttatcgataacagaaatcatttttatattgcaaatgaaagcgcatacgtttattgttgaatttgaaaaaacatgattttgtggaggaatttatttatgaataaaaagagtggtcataatatcaaatttaaatcaatttttgtatgtacttcagctattatgagtctttggttaggggcaaacttaactacgactcaagttcatgctgcagaagacaatgcagctcctaaaagttcagaagttgtaggccaaacgaattctagcaaagataatgcagctactgctactgtacaaaatcaaagtaacgcaaaagcaaagcagcgtcaacaaggtgtagctcctcaaaacgttcctacagttttggcagccaaaactaaagatgagggaacaaataactctccagcacgtgaggaagttaaagatcagactaaagtagttattcactacaatggtgatggtgaaaaatgggttccttatatttggggtaagaaacctaatggtaacggcaatgaatacaaatgggccggcaaagatgataatgggtattactcggttattgatttagataaaaactatgaccaagtaggagttttaattaaaaccaaaggcagttgggctggtaaagacggtacaggtgctgatcgtagcttaaatgttagcgataatggcaaagcggaagtcttctataaagcaggtagtgatgatgcccaaaaggtaacaccagagtaccattccgcaaatataaatttgcattattacggtgatgaccaagttaataaggttaatgtttggacagataaggatcaagataataaacaacttattagcttaaccaaacaaggcaatagtcaagatggctcaatcaaattagacaatactgattttagtaaactttttgttgcgccagttggttctgatgaaataacaagagaattcactccgttaccgggtaataaggcgacagatatttatttagttaaaaatgatacagaagcttattatagcaagagttttgccttagctgatcaaagtctatcttctgcatatatgacttcaccagatagtttgactgttgaagcaggtaaggctactactgtcgataaaattaaaggaaaacttagtctgcgaaataatagtattgatcatattgaagcagtcgatgctaatgctgatggtaaagcaaagaaatttattattcataccaaaacagatattgatattttaaaggataaccaagttggactagggatgaactttaaaaatgttgatatcggtccttatgttcgttccaaagcttttgacgataaatatgcctatgatggtgacgatctaggctgcacctatgatagtaaaaagacgcaaattaaactctgggctccaactgctaaagatgttgaattgaatttatatgatagtgttgataatagtgccaagcctacgaatgttattgctttgacaagaggcgatagaggtgtttggactggtattattaagggcgataaaaaaggctgggcttatgattttaagttaacttttggtaatggcaaaataacacagactgatgatccatattctaaagccgttactgtcaatggcgttagaagtgtaattgaagactacaataatatcaaaccgacagattttaaccgaatgccttcattctctaagccaactgatgcaatcgtttatgaaatttcaattcgtgactttagtagtgatcctaactcaggaattaaagataaaggtaagttcttagggatgattgaatcaggtaagacaccaactggacaagttactggtttagactatctcaaggcattaggcatcactcatgttcaaattatgccttcatatgatttcgctagcattgatgaaactaagagtttaaagaatcaatacaactggggttacgatccaaagaattatgatgtgcctgaaggatcatattcttctgatccaactaatccaactgctagaattatcgaaatgaaagaaatgattaatggcctgcataaagctggtattagggtcattatggacgtggtatacaaccatgtttataatcctcaagagcaagcttttgaattaacagtgccaggatattatttccgttacgatgctgataataataccacaagtgatagtggctgcggtaatgacattggtagtcaacgtaaaatggttcgcaagtacattgttgactcagtagtttactgggctaagaactacaatctagatggcttccgttttgatatcatgtccttactagatcgagagactatgaatgatgttagagctgctctagataagattgatcctggtattattacttatggtgaaggctgggaagttggtaaccagaaatatactagagaagaaggaacgacccaatacactgcggataaagttcctaatgttggtttctttagtgatgatatgagaaactcggttaaaggtaataatgatggctccgaaccaggattagtaattggtaacggtaatgaaaaaaactttgataagcatgctgtcttgtttaccgatagttttttaagaggtaaatggttacataatgattcttgggagccacataactatgcaactccaagccaaatggttaattatgccgcttgtcatgatggtaagacgttgtatgattacatcaaggctgcaatgccaaatgaatcagatgagaatattgccaggagagtaagattggctaactcaatgatcatgctttcacagggtatttctttcttccactcaggtcaagaagcattaagaactaaaggtggcaattcaaattcatataattcaccagtaaatattaatgaaattaattgggaaagagttggtgctaataaagcatcagtccaatatttccaaaaattggctaaattacgtaaacagctgccaattttgcatttgaatgatttcaataagatttatgacgagaatgttactaaaattattagttatggtagagaaaccaaagataaaaacatcaagggtgtatttgagtacgaatataatgttaatggcaagaagttattaattgtctttaatgtcaacaatgataaagttgctctaaataatgttgatttatcacatggtaagaaattgttagatagtgatggcaatgtgaaattaagtgataaaactatgctggcaccattaagtacacttgtagttgatgaagatggaacaatggttttaccagacgtgccaaaaccagatcagcctgtaagtccaaccactccaggtgataagccaggtaaaccaactacaccagaaaatccaaggattccggatcaaaagccagccaatccaattgttccgcaagaaacaattattacacctgaagctccaagtgaaaatagtattatagacaatactaaaaatataattaatggatcagaagagactactacagtttctactcaggataatacaaccactgaaatattattgacccataatgcttatgtgtatgacagtgaagcaaatcctatttatcaaaatgataacaagcttgtcttgaaagctggagatacaattaagcctttggataatggtaaaaagtatagtattaaaggtaagttgttctataaagtagctaaaaatcaatttgtcaaagttgctaatactgttagttactataagttagctcataactcattcgtttataataagcatggtaaagcagttaagaagaatggaaagcgcattttacttaagaagaataagcatatttcacttcattctgataaggtcgttaagattaaagggaagaaattctatcaattaaaagatggtagctttattaaggctagaaatgttaaaagaattggttagatttagatagttaattaaaaatattaaaaaacaagattgtttccaaaatgggcaatcctgtttttttaatcctgattaatcaagctaacgggcaaagtataaacactctccaatgataccgctggatcattaatttcgcaatctctttagtccgttgccgcgcactaattaaatgtgggaataggttctgaatcaattgtgtgccgtcaaatcctgtaattaacgattttttatttaaataatcgttgcattctttagccaataaagccgtaatgtcatccgtacaacaaatcgcatcgtaatcgttatctttcaaaaattgaaggatagcgattacgatgcgataattgattcacgggcgctaattgagcgtaaatcaaatttaacgtcaaaggtattaaacacacacatcatccctttgatacgatcactgattggataatagtcttctttggaaccagcaataatgattactttcttctttttttgctttaaaaccgactttgcaatttgcatctccgcatcatagttattcgactgcacagtagggatctgcggactaattacccggtcaaaactaaccaccggtagattaagcttgccactcttctttgaaatctgaattggcgagctggtaagtaagcctacgatctttttttgcttatatttatccaaataatactgcatatcttgctcttgataatgatctaaatgcaaaatgcaatcataacctttatcctgcaaaatagtagccaagtattcatacagttctgaatagaaaggattattgatttgcgaaaaattgatttcaattaagtttaattctgttttagcggaaattgcattcttgggtttataacccagttttttgatagcttcctttatttttaaagccgaatcaatgccaacgtaaccattctgattaagatatcgcgaaacggtggcaatagaaacgccggcttttttagctatttctttaatagttactgccatgttttacacctttatatgtaaatcctacacactttctatcagtaagtatagcatattctaaaacctgaattgtcaaattaagtgcaacagttaggctatgaggaaatatattgcttgaagagttcttctgctgtgtgatattgaaggattcgacgatgtttgcggttaatggcatcagttgcctgttgaacataagcagctgacttatctttcatgcttttgcctttagggaagaattgacgcagaagtccattgcagttctcattggtgcctctttcccatggagaatatgggtgggcgaagtagatctggcagcctttgatcttggtcatatccgcaaactcagagccattgtcaaacgtgatcgatttaaaccaggcaggatgtctgtcaatctcattttgaagcagccttgggcatgtgcttgcccgatagtcaggaatcttgataactacttcaaagcgtgtggttctttcggtcaaagtcattaaagcaggctgattcttgcgtctgacgcctttaaccagatctccttcccagtgcagcggcgtttttctgtcttcaatctctttaggacgctgttcaatggaattgccaagatgcttcttgtgcaaagcatgaccgctatggccgtgatgacgcttgttcctgcgtcttttgagcttcataggcagatcaatattgcttatgtccagcaagccctgatcaatatagcgatagacggttggtgtgctgggacaagggtagcctggcatttgaattcaccaacgaattcatcgatgctggtggcatcaaatttagctttaaagcgtctggagagcattctcaaaaagacagcataatgcttcaatggattgcgctgatagcagtttttgcgacgcttctcataatgaagctgtgcagtatcagcgtaatagtgctcatacaataaatagctgctgtctctttgcaggacgcttccgcgtttgatttcgcgactgattgtcgacttatggcagccgacttcttgagcgataacagtacgggaagttatgccggaatccagcattgcttgaatttgtccacgttgtacgctggttaattgatgatagtgcttagaaatgctagaatttgaattggtcatgaagatcttcctttcttgatttttcgtcacttcaagtttaggtcttcatggcctttttgtttaacacttggtgttgcacttcaattttaaatccgggtccattattaattcctttcatagaaaactaaattccttttctaaaggggtcaagagctattatatacagttttctcagcagttacattcgcaaaaaagaaaaatgctaaatttatttaaaatatttagattttttatgcaataaggacaaatagctaggagaaagaacaaagaatatctccccatctattgatgtaacgctaaaacataatttactttctttgtaattttgtgtatactaaatatacacaaaaaagaaagaggcgtacaactatgactgtaaaattaagaaaagttggaaattcaaaaactttaacagttcctaaagatataataattactagtaaagagtatactgtgaaaaatgaggggatgaatatagtttttacacccgtcgtgaagaaaaagaaaaatatttttgcaaccaaagaatggcaaaattatgattatcaaaaagacatagaaaatgacgtggaactacaatcagtaaaaccagtgggacgtgaggtagttgattaatgatttatccgaaaaagggagatattgttaaagcagatgcagaacctcattccggacatgaaatgggtggccataatccgcataaaggtaatattagaagacattatgtggtaatgagtaccagtgcctataataaatcaacacatatgtttatagggatgccgattactacttcagataaatatcaaggcaacccacattacgagccaatattaattccaggcagtaatggcactggagtaaaaggttatgttgttttatggcaacttcagaattttgactttgaatctagaaatggagaaattgttaatcacgtaaatattcagctattagacaaacttcaaggtttcgtgaatgatatggtgggactagaataggtaaaacaattatgccaattttaaggctagttcgattatgctgagaggacgattctgaggtcaagttcgactgcagaggttaaaattaatcatttaatgcaatagaatgctaattcttatttttatgggaaattagcattcttttttgtactttctaactatgtagaataatgagattttattctacatagtacatctaatcatgcattattctgctatgccaattttggggtgtgttgattatgtagtataattagctatagactaattattcaacatagagtgacgaaatacttgtatatcaaggactaatataaaaattgacagaaggagacgtaaattgaagcataaagatactcgtccaattactgatccaataattttaaagaagtttttgaaacatttacgtgaagatactagtatgggagaaagaaactatgctatatttcaaaccggtaaagcaaccttactacgggtaagtgatgttctagctttgaaaaagaatgatgtctttcaagccaatggcagagttaagaaaaatgcttatatcgttgacaaaaagacaaaaaagcctaaccgattatatttaactccagttagggatgttttagaggattactatgattggctgcaagaatatgaaaagaagcatccctacacgaagctgttttcttctgaatggctatttccaagttctaggagattaggtgaggatgttccaataagagaaaatagtttttatagaatttgtcatcagaccgagcttaaaattggggttaattggattggctcacactcaatgagaaaaacaggagcttttatggtttatcagcagactaatcataatactgctttagttatgaaaatgctaaatcactccagtgaagcaatgactttaagatagagaccgtaaaatattttgtgtaaggatgaatatttccttaattttattttcctgaatattagaaaaaggaatccttttcccgtatgattgatttgaacgaaaaacatactagaaaagagattccttcatgaatgattttaccaaagatatggctaatgctctattcaatcaggataaaattaatgatttatttagacaaaagctccaacaggctgtcaatgacctgcttgaatccgaattgactgcctttttaggctacaatccttatgagcgcgatggctggaataccggaaattctagaaatggtgcttattaccgcaaggttgatacgcaattcggacaaatagaaatcaaagttcctagagacagaaacggtgagtttcatcaacacactatgccagattataaaaggcatactgatgttttagagcaaactgttatcaagctctattccaagggcgtcacaacccgagaaatcgctgatttgattgagaaaatgtatggcggctattattctccagctatggtttccaatatttctaaagaaatgattcccaaagttgaggcatatcatcagcgacatctgtcagataagttcttctgcgtttatctcgatgccacctatattcctcttaagcgggtcacttatgagcgcgaagcagtttatatcgccatcggtatcaaacctaatggtcataaagaagtgattgactactgtattgcgcctactgaaaatattgagatttggagcgaaatgctcaaaggcttcaagagtcgcggccttgaacaggtagagctcttcttgtctgacggagtagttggcatgaaagaggctatctgccagtcctatcctaaagcgcattttcaacgctgcttggtacacgtcatgcgtaatatcagtgccaaaatgcgggttgacgatcgaaaaaagcactggatgaattcaagcagattcatactcagtcaaacaaagaaatggctgtacaggtgctgcatgaattctatcaaaactgggaaaaagcctacaaaaacgtagttagagatcttagacaggttgagcctgatctgttaaccttttacaactatccgccagctattagagcttcaatttactcaactaacatgattgaatcctttaacaacaggcttaagcggaaaaccaagcctaaaacagaatttccaactgagcagtcgcttgacacctttattggagttcaggcaatggattacaatgaccgttactttaacaggattcataaaggatttgggcaagttcgagacaccctagaatcctattttgattaaaagataaataaaaaagtcaatcaacgagagagattatttacacaaacttcttgacagtctctaatgtcttaactgttaacttaggaaaatgtcctaattgtagtaagtatgacataatttcctttattggaggttatagttagagtgaataggattgatttaactatgaaatatgatgaacagtacaaagtcattaaggatcttgtagatcacaacggcaataagaaaagagcagccttgaagctaggaatatccgttagacaaataaacaggagaatcaagcagtatcaagctaaaggaaaagcggccttcgttcatgggaacaaagaccgcaaacctgttaattgtctcaccacagaaattaacaatcaaattgtaaccttataccgtactaaatatcaagactgcaatataaaacattttgtacagctgttagatcgctttgaggacattcatgtctcttataccaaagcttacagcctgctcaagcagcaggatattctttcccctaagccttggagaaagactaagcgtgccttagccaaaaagaaatggcataagcagcaccctaagcaaagcaaacaagaagtcagcgctgcagttgatcatcaactagctttggcagatgctcatcctcgccatgaaagatgcaagtacttcggcgaagaaattcagatggatgcttctgtcttagtctggtttggtaagcgtaaggcttacctgcaccttgcaatcgacaacgctactggcattattgttggggcttattttgactgggaagagactttgaatggctactatcacgtctttgagcaaattcttaaggaatatggcattcccctttgctttaagactgataatcggactgtattcaattatgagactgctcaaaccaaagctgcccataaagatgtgctgacacaatttggctatgcctgcaaaactcttggcgtagatctaaaaactactagtgtttctcaagccaaaggcatggttgaaagagctaaccaaaccgtccaaggtcgccttaagccagaactaagattggctggaatcatgacaatcaacgaggcaaataaatacctgcatgatgtgtttgttcctgactttaaccaaaacttcagtcagactagtcgtaaagcctggtatgtttttgaaaaggctcctgatgactgcaaaatcaattataccttggccgttctcactggcagagtgtttgatagcggctcagctatttctttcaaaaacaagctttatcaagcaacagatgaatatggcaaattagtctgcttcatgaaaggaactaaatgtctggtaattgaagccctagatggacaactgctaacgacagtagatgagcatgtatatctgcttaaagaaattcctaagaatgccaaaatatcgccagaagtagaccaagagcctaaaaagaaaaggaccaagaaaaagtggattccaccaatgtcacatccatggaagcgagaatcattcataaagcaacaaaagagagctcataaataccatcaatacgtataaaaatagcggagagcaaattctccgctaataattaaataattttgggacattttcctaaattattgacatatttttatgataattcatttgcaagcgtaagtcctcgtaaattggttttccacctaaaatgtccagaatgtagtaagcaacgaaagtaacaataatcattggcaatacttgctggacagtcccaatcatttcagtcagtagcataattgctgtgaatggtgctttttctattgcaccaaaatatgcggccatggaaatcactaggatatgagggaagtacattggcaaaataatctgcaattttatcataatattggcgcaaattattcccaataatgccccaagaactaggataggcatgaaaataccaccaggtacggaagaatcatatgaaagcattgaaaagacaaaccgaattatcaagaataagatcggtagtaaaaaaagtcccatgatccaaaggctttgacattccaattcaaattgaataaattatcaattaacacatgtgaaccaccgagtaagtgggcattaaatagaccaactggaataattaaaattaaagcctgaattgtcaaattaagtgcaacagttaggctatgaaggaacgtattgcttgaagagttcttctgctgtgtgatattggaggattcgacgatgtttgcggttaatggcatcagttgcctgttgaacataagcagctgacttatctttcatgcttttgcccttagggaagaattgacgcagaagtccattgcagttctcatttgtgcctctttcccaaggagaatatggatgagcaaagtagatctgacatcctttgattttggtcatatccgcaaactcagaaccattgtcaaacgtaattgatttaaaccaattaggatgtctgtcaatctccttttgaagcagtctttgacaagtactggcccgatagtcaggaattttgataacaacctcaaaacgagtggttctttcagtcagtgtcattaaggcaggttgatttttacgtctgacgcctttaaccaaatcgccttcccagtgcaggggaacttttctgttttcaacttctttaggccgctgttcaatcgaattgccaagattctttttatgcggagcatggccaccatgactatgatggcgtttgtttctgcgtcttttaagcttcattggcaggtcgatattgcttatatccagcaatccttgatcaatataacgatagacagtgggcgtgctaggacatggataatttggcataatcctgtgaaattcaccaacgaattcatcaatgctggtggcatcaaatttggctttaaagcgtctgcttagcattctgaaaaagacggcatagtgttgcagtggattacacttatagcagtttttgcgacgcttctcataataaatctgtgcagtatcagcgtaatagtgctcatacaataaatagctgctgtctctttgcaggacacttccgcgtttgatttcgcgactgattgtcgacttatggcagccgacttcttgagcgataacagtacgggaagttatgccggaatccagcattgcttgaatttgtccacgttgtacgctggttaattgatgatagtgcttagaaatgctagaatttgaattggtcatgaagatcttcctttcttgatttttcgtcacttcaagtttaggtcttcatggcctttttgtttaacacttagtgttgcacttcaattttaaatccgggattaaaattaaaggaatgatactgtgataggctgcagggatttttttaattttactgaaccatggctttagcgaaagtagtacatattgataaatgtatgccattattcccaaaaagataccaattaaaggtaaataatcgttaacgggtaaataaaggaatggtttgtttccaaaggctagaatagtaacgaagtcagctgaaaaagtggcggccaagacggctactactttttgaggtttaaaatcaaaagtaatttcttcgaccaagaaaagtgcaccagctattggcgcgctaaaggcggcagccaatcctgcagccacaccgcattattgtagcgttctcaaattttccttgttagatttaaatactttttctgctaatccttgaccaaccattgcgcccatttcaatacaaggaccttcacgacctagcattaatccaggacagatagctaataagcctccaataaatttccgccaaagaatggaccaccatggcatcttattttcatttaaaagaacagcctcgatttgtggtacccctgagccaattacttgttcaaggtaaggcgcagttattttacctaatgttattgcaataatgaacatcaataagatgtagggtacgatcagtactcgctgggctgccatttgcggataaatttgataaagcaacttcatagtttgatcaataatccagcgaaatgcgctaactataactccagtagttagcccaactgaaattgcttgaaccaaagttttagtcatgttggttgaaaaaaggttttgctaaaatctgttttgcatttttaatcattacatttccccatattacagacgatacatcctttttatcctaacaaaatatagcaaaaaaggcatttatgtttttgatgaatgatcttatttttgtaaaaattgttgttcccaatcatagacattttttatatgcttctttaaagcgttagaggctaacaaaatatcttttttctcaactgcagaaataatatccattatttcctgaaccgaggatttcatacaacgatcattgtctacgatggcataacgcatacgattggtttgagtacgtaaaagatcgatggttcgctgaagcgtgggatttccggtattttcagttaaaaatacatggaatagttcatcaagtttaagataagcttgccaatcatgttttgctaaaatttcttggaattttattccataatcattagccagttgtggatctaaattgggaaaatttttttccaaggcataactctctaatagagaacgtaaatcataattgtcttttaattcagctaatgtaatatggctaacgattttttttgtccttgacgaactagtaagccttcattttccaattgtttgattgcttctctaattggagtacgagacatgttaagtttaatacgcgtttgattttctgataaaagatgacctggcttaaaatgaccagtgtttatttggagactgtaaaatagtttgtgtaaggatgaatgattccttaaatttatttctttaaacattagaaaaaggagttcctttctcgtatgattggtttgaacaaaaaaacacatacagaaagaagaactccttcatgaatgattttaccaaagattttgctcaagctctattcaatccagacaaaataaatgatttattgcgcaaagagctacaacaggctgttaataacttgttagaagctgaattgactgcctttctgggctatgatccctatgccagaaatggctggaatactggcaactctagaaatggtgcttatttccgcaaagttgatacgcaatttggcccaattgaagtgcaagtgcctcgggatcgcaacggtcaatttcatcagcacacgctgcctgactacaagcagcactctgatgttttggaaagcacgattatcaagctatactccaaaggcgtaactaccagagaaatcgctgacttgattgagaaaatgtatggcagtcattatagtccagctcaagtatcaaatatttccaagcagatgctccccaagattgaggcttatcacaagcgcaagctaagcgacaagtttttctgtgtctatttggatgcgacataccttcctttgcgccgagaaacgtttgagcgtgaagcagtatatattgccattggcattaaacctaatggacataaggaagtcattgactactgcattgctcctagtgagaacattgaagtttggacagagatgcttcaaaacatgaagtccagaggcttgaagcaagttgagctttttctttctgatggtgttgttggcatgaaaacagccttggccaggacttatcctaaagctcattttcaacgctgcctggttcatgtcatgcgcaatatctgcgctaaagtacgcgtcgacgatcgtgaaaagatcatgaacgaattcaagcagatacatcaacagacaagcaaaaaagaagctgcagctgtcttgcacaaattctatgccaaatggaataaagcttatagccatgtcatcaaaggtttgaaggaaattgagcccgatctgctagtcttctacaattatcccaaacaaatcagagcttcaatttattcaaccaatatgattgaatcctttaacaacgtcatcaagcgtaaagctaagcctaaggcagaatttccaactgaacagtcgcttgatgcatttattggcatccaggcaatgagctacaatgaccgttatttcaatcgaattcataaaggctttggtcaggttcaggacaccttagaatcctactttgattaaataaataattaaaaaatcaatttacgagaaagatctatttacacaaaagatttgacagtttcgattattcatttggttctcctaactaagataattttacaacttttttattttttatattatttgcaactaataaaactaaaaacttgtatacaggttatctgtggtaaatcgttgacttacaaaatataagttttactatgtaattgtaagttaaattttgatagaaatgaggaaagaaaaatgactaaaattgcagtacttggtgcaagtggacaaattgctaaattagcagaaaatttatttttggaagataaaaataatgaattaattttatttttacgccatcctaataaattggataaaaaagatatcgatgatcaacgtgaaaggattgtcgtaggggatgcaagtaaattggatgaacttgctccggctattaaaggtgcagatatcgtttatgctaatttagctggttcaaatattgaagatcaagctaagacagttgttaaagctatggatgaagatggtattaagcgtttgatttggatttcctcgttaggagtctatgatgaggtaccaggcaaatttggtgaatggaacaagaatattttaggttcatatttgaccacttatcgtgcagctgctgatcaaattactgctagcgatttggattacacgattattcgtccagcttggttgaccaataaagatgaagttgactatgaaataactgaaggcgcaactaccccatttaaaggaactgaggtctctcgtctaagtgtggctagttatgtaaatgaaatagttaaagaccaaagtaaagacagtcgtggtaatgttggtttaaataaaccaaataccgacggtgataagccagcttggtattaaaacaaaaaaataaagaccagcttcaaactgaaactggtctttattttggcttaattatttttcgaattgtttgccccaagcccatggatcttcgtgccaggtctttaagacatcatattgcgtgctagaaatatgacctgactcattttcctttttgagtaattcagggtaggaaagaagcggagcatatttaacattagctttagcaaagttttcttttgcatccggtaggtagtaggtgaaaattgaagaaacgccaatgacgttgccgccatctttttcagttgctttaactgcatttaaaacggaaccaccagtggtgattaaatcatcgattaaaacgatcttatcatctttactgaagcggccttcaatttggcggcctttgccatggtcctttggcttaggacgaacatagatcattggtaagtgtagtttatctgcaacccatgcagcatggggaataccggcggtagcgacgccaccaataatagtagcctcagggaattctttggcgattaaattagctaaatcaccagcaatcatatcgcgtaattctggatatgaaaccgttaacctaaggtcggtgtaaattggagaaagcatcccacttgcgtaagtgaatggtttgtcaggtgagatagtgataattttttcttgaataagttgactgataatttgatccttatgcattttagttaaactcctttttaattgcttcatatgcagcttctgggtcactggctaaagtaattggccgtccaacaacaatagcgcttgagccccattctttggcttgcgctggtgtggccacgcgagattgatcgtctttagcattgccagcaggccgaattcccggtgtgacatataaaaagtcatcgccaactttttcgtgtaattcttttacttcaagtggtgaacaaataaccccatctgctccagagtgcttagccatttttgctagcgaaagaacttgctctttcattgacagtgcgcaattttgttcatgtgccaatacttcatcagaaatcgaagttaattcggttactgctagtaacttaggcacgcttttgccagcaggtgtacccgcgattaaaccgtctttagctgatttgatcatttgactgccgcctaaagcatgaacggtagtaaaagtaattcctaacttagctaattgtttagccccgttataaacggtattagggatatcatgcaattttagatccaagaaaatcttataaccttgctcagctaagtctttaaccacttggttgccagcgtgatagaataattccataccgactttgataaagacgttttctggtttgcctaatttagacaaaatcttatgcagttgctcttcattgtcaatatctaatgcaacaattacaggtttcatttttcctccacaaaaaaagtctatcttagcgcagagagacaccaaggatagacttttcctagataatttaagtcaatattttgaacttgcggtctctctgtaccgtttaaagtttgatcaaggtgaagtttaacacctcaaaagtaaaaatacaaataaaatttttgcttggaaaaaattataatcacgtgtagaatcatttcttgaaaaaataaagagtgtccgtgagcattcattttggaggaaaattatggttaatacacatgtaaaattaccaggtttagatttgaaaaatccagttatgccagcaagtggaacttttggcttcggcgatgtgcctgcagctaagaagtttgacttaaatgatcttggagcaatggttattaagacaactacgccacatgcaaccacaggtaatccgcaaccacagattgacgttttagatgatggggttttgaattcggttggtcttactaatcctggtgtggaaaaggtgattagtgaaaagttagaaccattgagaaagcaatatccagaattaccgatcgtggctagcgttggcggtgatagtgaagcagattatgttgaagtagcacaaaagctgtcaaattctggcttggttaatgctttagaaattaatgtttcttgtcctaatgtggctcaaggtggaatgagctttggcgtgcatgccgatgtggttgaagaattgactagaaaaattaaagcagttgtcaatattccaatttatgtgaagttaacaccaaatgtgactgatatcactgtaattgctaaagctgccgaaaagggtggtgccgatggcttatcgatgatcaatacattgctagggatgcgaattgacgtgaaaaaacgcagaccactgttaggccataatatgggcggtttatcaggtgaggctgttaagccaatagctattagaatgattagtcaagtgcgtcaaattacttctttgccaattattggcatgggtggcattgcttcggccgaagatgtggtggaatttatgttagcaggtgctaatgccgtagcggttggtactgctcattttaaagatagtattgcttctaagcatattgcagatgccttgccgcaagaacttgaaaaattaggcattgaagatatcaatgaattagttggtcaagtaaaatttaattagagcttgacaaacgtttctaattacagtaactttaaagcaatgaatgtcctttaaaattagtcccgtgaggctagcaaggcaggcttaacttaagtttcgactttactaaagctcctagtctcagttgagattgggagcttttttcatgggcagaattaggaggctataatggcaaaagaaatctgggatgcactagcaatgaagcgtgctttaacccgtattacttacgagatcattgaacaaaataaaggaaccgatgatttggttttggtagggattaaaacgcgaggcgtttacttggctaaacgaattcatgaccgtattcagaaattggaaggcgttgatgtaccagttggtgaattggacattaccttatatcgggatgatcgtcatgatgctagtttaaagcaagatccagttgtcaattctgatcaagttggtgttaatattgatgacaagcatgttgttttgattgatgatgttatctatactggacgaacaatcagagcggcgatggatgctttgatgcacgttggtcgcccaagttcaatcagagtcgcagtgctagttgatcgtggtcaccgtgaattgccaattcgtgctgattttgttggtaaaaatattccaacttctgccgatgaacaggttgctgttaatgtaattgataaggacggcaaagattcagttgaactgaaggctttaccaaaataaaaagaagatagttaaatatccaaccatttaattgactccagagagggccagaagggttgatttcttttcgtgtacacgggaagactctaggcctggagcaattaaatgcttcaggcttttttgtatagaaagaatagaaaatggaaaatttaaatcttgttaatttaccacattttgtgagtgttgaaaatttggatagtaatgaagtagaagccttaatcaggagagctgagtacttcaaaaaaggcggtgcaacaccacgtttaactaagccagtttatgtaactaatatgttttttgaagattcatctagaacacatacgagctttgaaatagctgaaagaaaactaggtttgacagttattccttttgatccggctcattcgtctgttaataagggtgaaaccttatatgacacttcattaattatgaacgccttaggtgtcaacttagaagtgattcgtcactcacagaatgagtattacaatgatttgattaacttaaaagaacatcaacatttaaatattggtgtgattaacgctggagatggtagcggtcaacatcctagccaatgtatgctcgatatgatgactattcatgaacattttggccactttaaaggcttaaaggttgcaattgttggtgatattactaattctagggttgcaaaaagtgacatggaacttttgactaggttgggcgctgaagtttacttctcaggtccaagttactggtatgataaagaattcgatcaatatggtaagtatgaagaaattgatcaattagtttcaaatatggacgtgatgatgctcttacgggttcaacatgaacgtcatgcaggcgatcctaatgaaaagacttttaatgctaaagcatatcacgaaaaatatggtattaatcatcaacgctatagtgcattgaagcccgacaccatcatcatgcatccgggtccaattaaccatgatgttgaacttagcggtgatttagttgaaagcgataagtgcatgtttgtcagacaaatgcaaaatggtgtgttcatgcgtatggcaatgatcgaggcagtattgcgcggtagacgacttggaggattagaataatggcaacagtaattaagaatggcacagtttatcaaaatggtcgtctaattaaagcagatgttttaattgaagatcaaaagattaaagcaatagggactaacttaacggcagataaagagattgatgcaagtggcaagctagttagtcctggactggttgatgtccacgttcattatcgtgatcccggacaaacttacaaggaagatattaaaaccggtagtgaagccgctgctcatggtggttttactatggtaggggcaatgcctaatgtaacgcctgtacctaatacgcctgagctaatgcaaaaaatggtacaagaaaacaatgaaaaaggtgtggttcatatttttcaatatggaccaatcactaatgatgaaactactgatgtcattcctgattatgcagcattgaaaaaggtaggtgcttttgccttaagtaatgatggtcatggagtccaaactgctcaaacgatgtatttggcaatgcaaaaagccaaggaaaataatttgatcattgctactcatgcacaagacgattcgctttttaataaagggatcgtgaatgaaggacctaaagccaaggaattaaacttgccgccagtaactgaattagcagaaacaacgcaaattgctagagacttgcttttagcacaaaaaacgggcgtccattatcatatttgccatgtatcaactaaaactagtgtggaactggttcgaatggctaaggcgcgtggaatcaatgttacctgtgaagtagcgccacaccatattttattaacagatgacgatattcctaaggacaacggttattataagatgaatccgccattgagaaataaggaagatcaagcggcgttactagtgggactactagacggtacaatcgatttaattgcgactgaccatgctcctcatgctcgcaatgaaaaagaaggtggcatgaagggcgcagcctttggtattactggtagtgaaacagcattttctactttatatactaaatttgtcaaagaagaaaaagtcttcaccttggagcagcttttatcatggctctccgataaaccagctaaaacgtttggcttaaaaaatgccggggtacttgaaccaggtaagccagctgatattgcgatttttgacttagaccatgaaactgaattaaaagaagaagactataagtcaaaaggcgttaatacaccatttacgggcgacaaggtgtatggtgaaactgtaatgaccatggttgatggtcaggttgtatacagaagggatgaacaataatgcggtatttaatcctagaagatggtagcatctatgctggcgagggttttggcgctgattgcgaaacagttggtgaagttgtatttacaacagggatgactggttatcaagaagcaattaccgaccaatcttatgccgatcagattttggttttcactaatcctttaattggaaactatggtattaccttggcagattatgagtcacttgagccaaggatcaaaggcgtaatttgtcaccaggttgcccgtcatcctgataattggcgaatgcagacaaccttaccaaagtttttggagcatttgaacattccaggtattcagggaattgacacgcgtgaattagttaaaaaattgagagttcacggtacattacgtggtaagattgcagattcaaaagaaaatgcagaaaaaattgcggcagaattaaagactaagaatgtaactcaaggtgtaattagccgagtatcaaccaagtcaccatatccagttcctggttcgaaacgcaatattgtggttatcgactttggaattaaacacagtattttgcgtgaactagcagaacgtgattgtaattgtattgttttaccatatacagctactgcccaagaagtattaaaccttcatccagatggtgttcttttgagtaacggccctggtgatccagaagaaatggtagaggcaactaaaatggtgcgtgaagtagaaaagcatgttcctttgatgggaatttgtatgggacaccaagtctttgctttagctaatggggctaaaacttacaagatgaaatttgggcaccgcggttttaatcaccctgtacgagagattgcaactggtaatattggttttacttcacaaaaccatggttatgctgtgtctgcagattcaattgacaaggataacttaatgattacccacgttgaagtcaatgatgggacggttgaaggattacgtcataagaaatatcctgcattttcagtgcaatttcaccctgatgcaacaccgggtcctcatgatgaggtttcattattcgacgactttatgtcaatgattgatcagagaaaggaagaagagcgtcatgcctaaaagaacagatattcataagattatggtgattggctcaggtccaattattattggtcaagctgcagaatttgattattctggtacacaggcatgcttggctctgcgcgaagaaggctatgaagtagttttagttaattccaacccagctacgatcatgactgatacaacaattgcagataaggtgtacattgaacctctgacagttgaatcgatttcacgaattattcgtcaagaatatcctgatgctattttgccaacacttggcggtcaagtgggcttaaacatggctatggaacttgccaaaacaggaattttggatgaattacacatcgagcttctaggtactaagctgcaatctattgaacaagccgaagaccgtgaaaaatttaaggaattatgtaagtcattaggtgaaccagttccaccttctaagacagttaatacagtcgaagatgccttagcttttggagatgagattggctatccgatcattgttcgtcctgcctttacaatgggtggtaccggtggtggtatctgtaataatcatgaagaattagcagagattgccaaaaatggattggaactttcccctgtaactgaatgtttgattgaaaaatcaattgcgggctataaagaagtagaatttgaagtaatgcgcgaccatgatgacaatgcaatgattgtctgctgcatggaaaactttgatccggtagggattcacactggtgattcaattgtcttttcaccaagtcaaactttatctgataaggaatatcagatgcttcgtgattgttcactgcgtttgattagggctttgaaaattgaagggggatgcaacgttcaacttgctcttgacccaaatagctttaattatgatgtaattgaagtaaatccgcgtgtttcaagatcatctgctttagcttctaaggcaactggttatccaattgctaagatggctgctaaaattgcagtaggaatgactttggatgaaattaagaacccagtaacgggaacaacctatgcagaatttgaacctgcattagactatgtagtctgcaagataccacgctggccatttgataagttccctaaggctgatcgcgttttgggcacccaaatgaaagcaaccggtgaagttatggcaattggccgtactgcagaagaagctatgcaaaaagcggtaagatcactagaaattgatgaaaaagatctttactcaccagaagcacacgtagctagtgatgaccaattagagcaaaaattagtcaaagctcaagatgatcgtctcttctatttagctgaggcatttagacgtggttattcagctgaagatgttcatgaattaacgaagattaatttctactttttagatatcgtgcaacatatggttgaattggaaaagacacttgaggaaaataaagatgatgttgatgtattgcgcttagctaagaaatatggctttagtgatccaacgattgcctctttgtggaatgaaactgcagatgaggtaagagcatttcggaaaaagcatggcatcatcccagtctacaagatggttgatacatgtgctgctgagtttgaatcaaagacaccatacttttattcaacttatgatgctgaaaatgaatcacataagactggtaagaagtcggtgatcgttattggctcaggtccaatcagaatcggtcaaggtgttgaattcgattatgcgactgttcactgtgtcaaggccttgcaaaagatgggctacgaagcaattgttatcaattctaatcctgaaactgtttcaactgacttctctatctcagataaattatactttgaaccattaactttggaagatgtcttgaatgtctgcgacttggaaaagccagaaggcgtgattgttcaatttggtggtcaaacctcaatcaatttggctcatggcttagaagaacatggcgtcaagattttaggcactaaagtagctgatgttaaccgtgcagaagaccgtgaactgtttgatcaaatcattaagcaacttcatttgaatcagcctcaaggtttaactgcaactactcatgaaggcgtacttgaagctgctgataagctaggctatccagttttagtccgtccaagttatgttttgggtggtaaggcgatggaaattgtctacaccaagggagagttagaagaatacttgcaagaccacgttgatattgcagcagaccacccaatcttggttgatgattatcttgatggtcgtgaatgtgatgttgatgcaattagtgatggtaaggaagttcttttgccaggaatcatggaacatattgagcatgccggtgtccactctggtgactcaatggctgtttatccaccacaaaccttctctgatgaagttaaagaaaagattactgatgtcactagaaagcttgctttgactttgaactgtgtcggcattatgaacattcaattcattgtcagagatggtgaagtttacgtaattgaagttaaccctcgggcaagtagaacagtgccatttttaagcaagatcacgggtattgaaatggctcaggtcgctacccgagtaattatgggcgaaagtttggctgaacagggctacggtgatggtcttgccccagagccagacatgatctctgttaaagcaccagtcttctccttcagcaaattatcggacgttgatgcatatctcgggccagaaatgaaatcgacaggtgaagtaatggggagtgatcacacttttgccaaagctctctacaaagcttttgcaggtgctaagatgcaattgcctgaaaatggtaatgtattacttaccatcgaagatcgagacaaagaaaagattttaccaattgccaagagatttgcgcggattggctacagaatctttgctactaagggtacagctgatttcttgcgcagtcataatttgcatgttgatccagtaactaaagtgcatgaagatgaagacgccaaggataatatcttgaatgaattaagaaatggcaagattgacttggttatcaatacgatgggtcacgatattgaaaagaattctgatggcttcatcattagacaggttgccattggtcaaaatgtaccattaattacagcacttgatactgcagatgctttgcttactagcttggagaatagatcatttgctactgatgctttgaagtaggatagttgaatagataaaaataatgcatttctctattgaagtaggagaatgcattattttttatgcaaaaaattattttcacaagtgagctaataattctgagataaataaacgatagatagcattcaatcaagatattgtgaaaaaaatatgtatcacaaactttattatagagccatgagtaagagtatttcactatctttcgtaagcgaatacatttataatctgagataaggaagtgaagtgtttaggggggaataaaaatgtggatttcgtttttattggctttaattccaattatttggcttatttactctttggcaattcgaaaaacgcctgctattaaagcatgcagcattggactattaattactatcgtattggctatactgggatttaacctctctatagttgacactttgacgggtgctttagagggcattctgatggggctatggccaattgtttatgtaatcgtggctgcactgtttacttataatgtaagcaattattcaggtggaattaaaattattcaagatactttgtcgtcaatcactactgatcagcgtattttagttttgattatcgcatggggatttggcggattcttagaagcaattgcaggttttgggacagcagttgcaattcccgctgggatattaattggatttggtcttaatccgattaatgccgccgtaatttgtttaattgctaatactacaccaactgcctttggtgcaattggattaccagtgattacactgagtgacgtaactaatttgcccgttactccattatcatttgttattactttacaacttgcattattaattattataattccgtttttattggtgattctaacaggtggcggagttaaagctatcaaaggagtgggattaattaccctgatgtctggtttgtcattttcaattccgcaaattttggtagcaaaatttgttggtccagagttaccagcaattgttggttcaatttgttgtattttgactacagttctgatggcaaaattatatcatcatcaagataatgacataaaagagaatattgagaagcacagcgctatcgaaattttgcgtgcaagttcaccatttattttagtgttcgtatttgtggttcttgcttcatcactgtttccagatattcagcatctattgggaaaagtgacttcttatattaaggtatatactgggaaagatacagaactgtttaagattaattggctttcttcaccaggaacattaattttgctagctacttttattggtggattaattcaaaaagttagtttcaagaaattaggacaaatcttaaaatcaacaatttttggattgtggaaaacattaattacaatttgttctattgtggctttagccaaggtaatgggctacgcaggaatgacttcagcaattgcggcagcattagtagttctaatgggaccaatatatccattagttgcaccgttaattggtgcttggggtacgtttattacaggatctgatacctcagctaatgttctttttggtaacctgcaattgtcttcagctaaggctttaggcgtaaatagtaattgggtagttggttcaaatatggtgggagcaactgctggaaagatgatctcacctcagagtatagctgttgcttcagctgcaattggacaagatggatctgaatcaataattttgaagcaagtggctaaatggtgcttattgtatttgggaataatttgtatattcctatatggaataggctttgccgtaggatttttataaaaataatttaaataactcttggtgttctgatatatattgatttgcacttgtcatccattaatagtaaatcgcttgcattaaaagcgctttcgttgatagaatgctttttgtaacttttttacattaataagggagacaaaacgaatgagttatttatttctgtttattccggcaataggatggggtcttatgcccatgtttgttgctggtgtcaagaagagtaacatttaccaccaaattttaggtaccgttattggtgcatttatctttggtgctgcagttactctcattaagcgtccatcttttaatgcgactacttttattttagcaatgttagctggtgctgcttgggttattggtcaagttggtcagtattacagttattccaaggttggggtttctgaaactatgccaatttcaactggtttgcagttgatcggagtgccacttgtaggtgtgttgatctttggtgaatgggcaagcactcaagctaaattgtttggatttttagggatcttagctttaattattggtgtagcatttacatcattgactgacaaaggtacatctgagggtggaaaaaagaatcagaccactacaatgattgtgctggtattgactacacttggttacattacttcaagttccattccaaaggccttgaagggtgacagcgtaatgattttctttgctgaaaccattggaatgttggttgcagcaattgtttatttaattgcaactaagcaaacacaagtctttaaggaaaaagaaagttatcaagtaattcctgccggtgtgatttacgcaattgctgctcttgcatacattgtttcagttaagatgaacggtgtaaacctagcctttgttatgtcacaactttgtgttgttatttctactcttggtggtatccttttcttacacgaaaagaagacacaaaaaggtcttatttatactgtgatcggtttaatattaattgttgccggtgcagttttgacctcagtattttaatgaattttaaataaatattgaatgaactccaacatgataattgttggagtttttgagtaaaaaagtcatgaataaatataaaatgaattaaaatataagtagaagccaaagagaggatgatttctatgagtgataatacagtatacgtgatcgacggtcgtcggtatgcacgtaatggagaaattgtcgaacataatgtgcatgtttatagttcttatcaaaatctgattgctgcatttaagccatttttggaagtttcaaataaagaagtgcatatgaatggcaaaaatgagatgcttcaggttagaatatatgatccatcaaatcaatttttgacaaaatataaatttgatatttatgaaaagaaaatagataatttctttccaagtactactgaacatatttagcaaaggaatgatccgatgacttttaacaaagaagaaaaagagcaagctttaaagcggctaactgatgaggaatataacgtaactcaaaaggctgctacagaatatccttttaccggaaaatatgatgatttttatgaaaaggggatttacgttgatgtagtgtcaggtgagccacttttttcaagcttagataagtataatgcaggctgtggttggcctagttttactaagccaattaagaaattaacttaccaccgcgatcaatcgcacggaatggagagaacagaagttaaaagtcccgaagctgattctcacttaggtcatgtttttactgacggcccagtggatcaaggtggtttacgttactgcattaattccgcagcattgagatttattccatatgatcagttggaacaggctggctatggtgaatataagaaaatatttgaatacgcgtggtgctagttaaatcgttctagacaataagccaaattataagctaaaattgcaatttccaaccggctttgaaagcctatcagactacgtgctcgattgttctcggcattgtaataggtcagaagcgaaaagtcgctttcaattgttctgcgaatagccatcaattgatgatcattgtgctttttagctcctgtcatatttttacgatatggtgtccaaagttcgtaacccatttgttttagctgttgatgcagttctttgcctaaatagccttcgtcgccaagaagatagtaattagatggatgggtattttctatcagttcaactgtctccctggcatcatgaactgatgcctttgttacgacataatcaagaatgtaaccgtcatcgctaacaatggcatgaactttgaaaccatagaagtaaattttcttggtggccttataaccaatgttggcataaccgcgaaaaattttagcacgatagtttcgaattggttggcaaacaggtaccggaaagctgtcaatgatcaagaactgtccattcaggtcaacctttttattcatttcttgccgtatctgataaatcaattgcaatagctgacgtgaacgccgattaaaacgtgagtgtgataaacaattgaaacattcacagaatcttctttgtgattcaattcctgtcttagcttgccagataagtaaagccaaaatcagactgtccgtagttttaatttgatcaatatttcgccgatgagtaaactcagccggtgcatacaaacgataccagtgccgacaaattatcactaaatctttaaaactaacttgtaaatggtggctaaaacgcttaagcttaaggcagttcaatcagatcagactcttttctattattactatttacaagtcgagtctaacaagattggacttttttattaactaaaacgatttaactagcaccacgcgtatttgaataaaaaattatttctcatagaacttaatttcagtattggccaaatcaactgtataagtttcttcttcaagtggtcgtttagtcattccttcatcagttgagtagatgatcaaggccaacttactaccagatggaagagtgtagtaggtaggttgaagcaagaagtctaaatcgtagaacttgtcagcatcaatcttctcaggtcttttcatgtccttatagttttgtaagttcatgtgacccttagtgatcaacttagccttagtcttcttgtccggcacaaattcttgcaaagtatcagtgccaaatctatagccaagttcttgaccgccgcgcattaagaacttaggtgtagcggttaagcgtcttctttctcccaattcaactaaagcaacagaaatttgtcccttaggtaagctgcctttaactctaacttttacttcaggacgaccgacaatcgtagttgggtgaataaattcgtctgtttcaaaacgcaaacttggtttagcccatttttcatcaccacagatgaacttgtatagccagtcgctttctgagatgtcagccttcttaaattcaatgccaccttcatcgacaaatgattgttgtgcattgccattgccatcttggaaaagctcgccgtcatcagttgggtagtaggtcttcttttgacctaattcatttgaccaatccttttcttcgtgccacttgtcagcttgcaagttgtcctggatcatgacggttggccattgcttgtaagcattgttttcaatccctagtaattcatgtacaaaccaaaggttcattaagtcagtaaaatcaatagaaacaaagttgttcatattgtagtgaggaccttggtgtaggaaaagatgatgcttcattggcatttttttgactagttgccaaattttataaacattctttggcttaacgttccagtcatttaaaccgtgaacagaaatccaagaacatttgatgccgtcagcgtgatggcggtagtttcttgcttcccaaaagttggaatattgaccggtttcacggtcttcttttgttaaaagctctttttgcatcttgtcgtattccggtttgatcttcaagtaagaacctgcatcccacaagtttgattgacaagtttcagccagtaaatcaaggtcttcaccttggcaggcttcgggtgcgattaccaaaccgtgttcacggtaatagtcataccaagaagaaatagcagcttcagaaaccacagttttcaaacctttaaccccagtagtggcaatagcaatttgcaaagtgcctaaatatgaacgaccagtcatcccgatattgccattgcaccagtcagctttggtttgaacagatctagtacggtcagtgtaagcaatacgatcgccgtggagccattcgataactgcagcagctgattcagtttcttcaggtgcaccagtaatacgaaccccatcactaccacgggtaccgattgctccagcaaaaacactggcaaaaccacgagcaagcatatactcatttaatggataagaagatttatgtactgcttcttcggtagctgggtggttagagtcgtctggctgctttgctttaactattggtgcatgaacatattgtggatcattccaatcggcggcatcagataaattttcatcaacattatggttacgcttttcattagcgataattccgccgaaatatggtgaagcagtataaagggcaggcacttttaagcctttgttagtttcagctggtcggaaaacagtaacttgaatcaagtcactcttaccatcatgatcagtatcaagatcagtttcaacgtaaacaacttcacgaattactttgttggtatcgaagacaggaatagctttgccattgaaaaatttaaacttattttgtccccagaattgagtaaagtaccccttaccagccattacatcgagcaaaatttgaccgtttttggcgcgagtattgagcaaacgataaaaagcagagattaactttttgacatcagaaatgtcttggacaaaaggtaaagcattcttttgcataaagccagttggatcgactaattcgtagtcataatgaacatgatagccaagtaattgtaaggctacattatagaattgagcagtaccaattgattcaggctttccttttaaaaagtcagctaaagtttgctcatttgaaacagcaaattcagataattttgttgtcttagcagcgtcagtttttgcttcagcaattgtcattttaacgagcttgcccagcaaatcgttaaaattccagtctgcataatttttaggtaagaaattgatgtcgattaattcttttacttgttgatcgaagtcagtttcgacataagcgtattggttatatttcatatttttctcctttgcagtttaattactttctattttacttttaattgtggctataaccaatagatatggaagttaataagcgaaaaatatttttattttggtattcttttctttaaaatgaacttaaacaaatgggggatgctaaatgagaaaaaagttttcacttgtcttgctacttacaacgatatttacaatttcgctgacagcttgtactaatcagaataaggttgatcatactaaaagtcagactaaaatcacctcaacaccgacattatttttccacggtgtggttcgtcatatcatactgaagaacacatggtggcagcagctgagaaagctggagtcacgaactcagtgattagagctgaggtggcgcctaacggtaaggtttctttgagtggaagttggaaaaaaggtgccaaaaatccaattgcagaagtcaattatgaaaataaccgtgagttgaacttttctcgacatggtgtttacgccactaatgtagtgaaggctctgcaaaagcgttatggtattaaaaaatgaaccattctttaggaaatatttcgatcatttattatatgctgcaaaatggacgtaaccggaagatgccacaattagtcaagcaagtcggcatggcaggacattttgctggtttgaactttagccgtgttcccgcctcaattcgtcaacctaaaggtttaaaattgaattctgccggaaaaccgaacaaaatgaattctagctattggcaaatgacgggtgtaagagaaacatatccgaaaaataaagttcgtgttttaaacatcattggtgatattggtggtcaaaccgatggaacagtacccaatgtatcatctttgtcattaaagtatttagtggcagatcgtgctaaaagctatcaggtagtgaagtttactggaaaaaatgcacgtcactccaagttgcatgagaatccaaaagtagataaagtattaatcaaattcctgtggaataaataaagttagtaataggcatgcgaacgtatgtctattttttgtgccttttcttaatccaattacttgaattataaaataatgcgtgtataatattcatctaattaataaagaaagggcatggttttatgaagctattaaagactaaaatcttaacaattctgtgtggcttgctaacattgaacggcttagccatgttgttttcaggattgattatccaaatggacgaagttgctgattttgattcagcccaaagtttagcagttgctaattcgactaatgccattattttggcaggaattattatgattttgctttttggggcattgtttttcgatggttgggctaagctcaagaacaggcatgctaagcacgttaagttagtttaatagaatagataagactagctctgaagtgagctggtctttttttgcccaaaattaaagtcttctttaccgtttttttacttttgcatgtgataatgagccaaaattaatcagggggatagttatgggattctggtattattatgttttgccattagtgacggctattttattcgtttggctaggaaaccgagttatggtgactaaaaaatggattagcataattttttactcattagctggagtaggctatttaattgcatcggtttttgctgttttttatatctatgcaacagtagaagaaattttaacgccagatattttaacaaaaataggttggcattatttttggagtgataattttatttttcttcttaccagcactgttctattaacaattagctattttgtactaaaacgtggtagattacggatgaaataggatgctcaaaaatgataagattatttttggaaaaaatagaataatgatggggtgaaaaaatgactttaccatttaaggcagttgctgtagatatggacggcacgtttttagatgatcgtaagcagtttaatcacaaggaatttgatcaaattttgactgaatttgaacaacgaggagtacattttatcgtggcttcagggcgtccttatgttagattgaagcaggactttggcaagtttgccagcagaatggatttcgtaactttgaatggctcgagattaatcatcaagggtcaagaagctggcagttatttgcttaatcgcgatgacgttttaaagctaattcatgatgtacatgtgaaatatggtgaaatggctacgatggtttttggccgagatattgcatatttgcatagcaatgttgaaaaagatgaacgcgactttttggcttactttgctggtaatagcactgtaattaatgactggaatgacttaccagataagatttatcagatcacatttggaatggacagttctaaggctgcagaaattgaacgagattttaattctaagcacgataaccagatttctgcttttgcttccgctacttttgccattgatgttaacacacaaggtgttaataaaggcgccggattaaagcatctcctagaaaagatggggatgacaggggatgacctgattgcctttggcgatgggggtaatgacatcgatatgttgaaatttgccaaatattcttatgcaatggcaaacggtatggacaaggtaaaaaagcaggcgaaatatattgcaccggccaatacggagaacggtgttttcaaagttttgcaaaaatatttagctgaagataaaaaatagcttgtaaaattaaattaatatgatatagttttaattaacttatagaaatagaggaaattgccatatgattcgtttactgaatctctaatatttgatttgttgtttagcaaaatactgtctttgcaccttgtttagtgcacccattttttgcttgcataccaagtattagcagtagatgaattgagggtggttttctttatcgaaatcaacctttatttgttgcactgttaataggatgtgagcatccagaacagtgctttttctttgcgacaaatcatgttagagatttttttgctgattatacgtttttgtcaaaaaagaatgaagaaaataatgggtttaagagattatattaaagctaaccgtcagcgggcaatgttagttctgtttttgattacgctaacgcaactgacaactacaatgtacacctacttaactagtccgcagttaaatgcaattgcaagtggtaaattcgaactgtttttggaattaatctttgtacaatttttaattggacaggtctgcaatgtcagttttaattggggaagtttacaaaataccaaacaaacacagacactttttcatcaggtaagacagcgaattatacgacattattatcagcagcctgaagacaaagtctcagagatggaaaatcatttgggaaatgacttgcagttagtgcaagagagttactataatgtttacttctattttgtttgtgacttaatttatattattttaactattggtacgctgtttacctttcattggatattggttgtctatacattattagttactttgcttgcagtagtagtgccgaaattgactgaaaaatataccaatcgagcaactaaagctgtttctatccaaaataagcaatttttgcagttgttagaaaaatggttcaagggtttagatgagctgcgacgctaccagaataaagttgttttgaaaaaggtggtgggacaacagagtcagaaactagagcagagtgaatatcagcgagataaattgctacattatactagcttagtgtctgcgatatttaatatagctggtcgtgttggtgttccatttattgctggaattttgtttttcaatcatcaggtaaatttaggagcgattctgacagcgggatattttgccaatggaattttttatagtgtagatagttgcgtgaacagatatacgcaattaaaatcaacgaaaactttgcgggatgatctggctaaattgcaaaagtgtttaccagaaaaagggtatgattctttaaaacaaatcgctaccgttcaaataaaaagcttgtcagtacaatatccaaatggtgaaagaattacttatcctgactttgaactgaagaatggtgaaaaggttgtattgactggtgattcaggtacaggaaaatcaactttattaaaagttttgttagggcaaattaagccaagtacgggtgaagtaatctattgcgataaaacaggaaaaaagatcaaacctgatttacgtcaattaggttatttggcacaggacttattgatctttcctggcagtattcaagaaaatattactatgtttaagcctaagcttaataaaaaaactgtacaagtgattcataagacggtttttgatagtgatcaagcgcgtttgaaaaatgggatagagacacagcttgatccacaacaggaattgctgtctggtggacagaaacaaaaggtagttttaatgcgggcgttgttgcatgagaagccgattctgtacttagatgaagcaactagtgcaattgatcaacaagcaacgacaaaaatcttccaaaacttaatgcaaagtagagcaacaattttggccgttgcacacaatttaaccgtagaacaacgagcattgtttgatcgtgaagttcacttggagggaaaataatgagtagcaaagaattatttaaacttaatccaattaaattctgtctggctatgggactacagattattgcagcagttggcgaagtagttgtagattatgtgttaactttgcaatttgatgctgccaaaaatagaaacttgagtttatttttaacttggacattaatccagctgtctagctatgtcatggtattcttattctataatttggcgggaatcatttggcaaaagttgattcaaaattacctgcatttaattcggcaagaactaacagatcattattttgccgatagtcaaaagcatgcggttagtgcagtgcaaaatcggatgactaatgatttgaaactgttacataatgactatttagattcgttccgctatgtagtagggatgctagccggtattgtcggtgtagcctttagcttggtgacttttcagtggagtttgttagttgcttgtttaatttttgccgcaattcagatttatttacctaaattactggataagccattacaaaaagctactgaaaaggtatcagtagctaatcgaaagtatttgaagactttaggtgattggttaattggcttatcagaagttcgtcgctatttggctagcgataagctttttaagactattgctgaaaattcaggacgcttggaagcagcaaatattgagaaggaaaaagtagatcaggaattagattatctgaatcaattggcttattcattaggagatgtgctaatctttcttttaactggatttttggtagtaaataattgggctgcttttggtttgattgccagcattggcaacttcaatggagcactatttggttctttgcaaggagttgctaattatggtggaagaatgcgagcaacaaagaaattgcgagaagagatttttgtagctaaaaagaaaattcagtctgaacagaaaagtaatttagaacaagcggttagtttttcaatccataatttagctatcgattttagaaacggtgaggccgtgactttcccagatttccaagttaaagctggagagaaaattttactaacaggtgattcaggtacaggaaaatcaactttactcaaattgattttaggtgaattgcaagccagtcgcggcaagattcaatactttaatcaaaagggtgaaaagattcaacctgatttagctgaaattggctatttgccgcaagatccagtgttattcccagtaacgattgttgaaaatattacgatgttcaattcaaaattgctaagtcgagttaaatcagccattgaaaaagttcaatttgcaggagatattgctaagttttcggccggcattgagactaagattggccttgatcaattgaatgtttctggtggtcagaggcagaaaattgttttagctagaagcatggtacaccagagtaagttgattttgattgatgaggcaacaagtgcaattgatcaggcggctacgatgaaaattttgcgtcagttgactaagacggatgcaacgattgtattcattgctcacaactttaatcaagaaatgcatcaattgtttgatcgtgaaattcatttaaagaaataaaaacaagctcataaccacaaagttacaggttatgggcttgttttattatagccaaatttgttcgaaaatatcttctttaaaaccgcaagttaaattactgtcatcaacgactaatggccgcttgattaacttaccattttttgacatcatatctgcagcttcttcaatcgtcattgttggcactttttctttcaaattttctctgcggtaatcttgaccgtgtgtattgaagaaatattttagaccacgatcttgatatttggtcatccattttaccaagtcttctttttttggtggctgttcaactaaatcttgaaattcgtagttgacctgatggtcatccatccacttgcgtgctttacgtgaggtagagcaacgtttataaccataaaatttaatcattattttccgtccttatttttgtaaaaattttctaaaaaattcaatttcttcatcatttgcgatgtcagctaattcatctttttgatcaacaaagaaaacatgaccacgtggattttcctcatcgccataagatttgcaaatagcatgaacgccgcggccgagtaagaagccaaacagggtaaattgcatgtcatgtaagaaatctttgttggcagtaatcaaaaaagttggtaggaaattatgattgatatatttttcaacatcgagttgttcatgatacttgttaactgcatttttagtgaagtaggcgctagccatgccatctaaattgcttggggttaacatgaaggaagcagcacaattcaagccgacagccctaaattttaagttcaatggtttgtaagaaaataacttggcataatctggattagtcaaaatagtgacatactgctcagccatttgaccaccggcgctgtcgccaacgataaaaacgttgttgcgatctagacgatattcttcagcgtgctcatcaacccaatgcatgtagcgatcaacatcgtctaattcatcagggaattccgcgttttctggtgcaagacgatagttgggattgatgaaagcaaaaccgcgcttagctaaacccattccataatattggtagatttctttagtaccataaacccaaccaccgccgtgaatattgatgatgacagggaagggagcttcgtgctttttgggtaaataaacatctaaagtatgccacttttcatctggaccataaggcagattatcaagacgttcaacttcagggatgtcgtgaggcaagccactgtcacgtttggtgtcatgctgatatgcaccatctctaaagtcagtaacaaactttttgattttatctttaagttccataattgttctcttttctaataattatctatgttaactcaattatactttaattgaatttgaaaaaataaaaacttttttgaaaaatcctcttgcattttaattaacgtttccctataatagtctatgttctgttgaggacgtacaaacatacaagatggtctggtagctcagctggatagagcaacagtcttctaaactgtgggtcgtgggttcgaatctcacccggatcatataatcaagcctgtaagtattgatcttacaggctttttgcataccttagatatctaaaaggtatctaatgtgctaaatttgatttaaaacttcttcaatttgatcatcagattgctgacgaagttcatcaagcatataggcatatactgaagctgtcatgctcatagaagagtgtcctaatctttttgaaatggcatagagtggaacacctttaaagagtaaaagagcaacgtgagtatgacgcagactgtgaaagtgaaaatgatttttggatatattaagcttcttaagctgcttttttaaggtctgattagccgcagtcgttgtgataattttgccgctttgagtcataaatacaaatttttgatgattggctttaagttgcttcaataaatcaagcaaattctctgagactcgtataactcgtttactactttctgtttttggctccttaattttaccgtcaagataactatatgattttgttactttgataagatgctttttaaagtcaatatctgtccatttcaaagccataatttcgcctattctcatgccagtatatatcgcagtaatgatcatatatctgcttatgtaggtcggcttaatatttgattctagagattcgagtaacttctgcacttctttataatttaaatattgcactttatggctatgtgaatcattccaggttaggttaactctatcggtgaaattattggttataagcttgtcagaaagacaatcgtgaacaaatgcttttatatatctattaagaagtcttacagttgtttttgcatgatttttaccgtagtcgtttaaaaagctttggtatcgttgacgattcattttagttagtttgacattaccaaaatagtttttaacaatagtaattgagtaattgtatcgacgctgggttgtagttgctttacctggtatcttatatgtattagtgtattcttcgtatgcttgtgcaaaggtggggttttggtcagatattttgttatcatctttagcaacttccatttcgttagcccattttctggctgcagatttagttaaaaagccctgttttgttttaaaccgacgcttaccttggtcatcataccaagatacttgtgctcgccacgtagcgcctcttttttcaaaatgtgccatattcattacctcatacgtttacattatttatgcattaattatgcattatgtataaattacttatatgtgacttaatataaactcacctacttaatttgagcaggcgggtgtttttgttaaacttagaatatttattccatgaaatcattcttcaaatctatatttgttaaattcctcttgcacttgaaagtaatcctgtgtacctatacctttagcaaaatctaaccaattagcagtttgaaaatcgttacccaaagcgaaatattgtctgactctttcacgtattaaaaaagaattcgctccgtgttcactgcaactatgagcacaatcatccgttttgtagtctccttgaacatctttgtcgtatatcatatgtcccagttcatgtaggattacgtttttagctttctcgtcgtcataacttgaattaactatcattacgtctggcttattatcttctccaggtatgagtaaacctgggcaatgtagaggagcaaactctaattttatgtttgattctttaagtagccttttaagttcagtgtccataatgcacacctttttctatttttcattgtaaattctctttaaaatgtctctaactagatctttgtcatggtcatcaataggcttaccgttaaaaaatctagcattatcaatcattttatttaaatcggagtctgtaatttcactgttagtggaggaaggagaagggttattagttcgtccaagcagataatcagtacttgtgttaagtttttccgcaaaggtagctattgttgaaatatcgggttctctttttccttgttcataattagaatatgttggatatgggataccgatttcggaaactgctctttttcttgaccaccccatagcttttcttgcattgataagtctatcgctaaaaatactcataaaaatcctcctaaaagctaaataattatcctatttgactcaattctaaaattaaatattcaatttgaaaataattatatccaaaaaggataaacatttattgacatttatccaaaacggcgtattataattcttgttaagaaaaatattcaaactgaataataagaaggtgataatttggttagagcaactaaagaaaatgctggaaagattttaaaaagttatcttagagagcatggaattaagcaaaactatgttgctaaaaaagtaggaatcagtagcgctaattttagcagtcgactaaatggtcgtttaaagtttaatgcagattttgcgctaacagtgtcaaaggctttagatatcgatccagagatttttttgaaataaaattattcaaattggataagttgagaggagcataaagtggagaaagtgtttgaaggatcaaaagcttttttaaatattccagtaggtatagcgagagataaggaattattgaaaaagcccaaaactatcctgttaatgggcgaaataatttcaatgctcaatgtcactggcgagttttttatgagtaataaaaagattagtgaacgattacaagtatctactcgtactgtcaatgattacctcgatattttggaaaagaaaaagctgatcatacgtgaaaaaatagtgaacgatgaaaataatgcaatcatcggtagaaaaatacgtgctggtgcagccctagtgaaatgcatttcactagggtggggaagcccacttcatgagggtagtgaagctcacttcacacccctagtgaagcccacttcacataaaaagaacagagataatagaacaactaatagaacagttaataaatcttcttcttctagtttctccttagaggatcaaagcaacagtattaaaaatcaaaaatccgaagaagaagataaattaaataattctaattcacgaaaagaagagcctcgaagagaaaaggtttataagagattatttcaaattgcaagaatgaacgatcaatggaaaggcacacgtactattccaacgccagatcaaataaggcagctgcgtatgttgttgtaccaatgtgattatctttcgcttgatgcagtactgcagacatttagtgaaaagatgagagcagatcaactatttgaaccgtggaaatacgtattacagttgatgcgagataagatagcagcacaaaagaattatgaaagctggggataaagatgcaagaagatatgtctaacgcattaatcaacattccaagtcttacaagctttgtaaaaagtattgtcaaagaagctgttaaagaagataaaaaagatttaactggcaaaacttggaatatcaatgagtttagaaaatactgttgtcgaggtaagggagataactgggtaagaacctttattttcgatgaatttccagaagtcgattacaagaacggaggctttgtagtaaatcctagaaagacacctgaaggcaaaacaacaattatttttgctaaagaagcttgtgagtggatgcaacaacatcagcatgagattgattggaacgcaaaaatcactagttagcataaatgtatagagattacaaacaaataacgccctacaagtagtagagcgtcatagatttaaaacggattggagaaaaaataatggaattaacaggtaaaaaagaaaattttgatgaattcttagtcaaggtagatgagttaggctatgctattggagacgtactccctaatagctggacattaaacttaactgatgttacaagattgctaaatgaaatgcttagtgagaagcacctcaaggttaaacaagaaactgtaacgacatcggataatttagcagttcaggtcaaaacaattttgcaagatagagatttgcaagtatcagctagtttagatacgatactagattcaaataatcaagttgaatatatgcttaactggtggcagtggcggatcaattgtcaattagcattgatcgaagtaatttcaggattttatgaaaaagcaaatgtagaagactagttagcatttgctaaaacagatttgattagggaaataattaaatctgtctgttgatcagttaagtcttctggcagaacatttaatatcttgttttgttgaggtgttaagtcaatttctttagaggtatctactaaagaattgacgctgacgttaaataagtcggctaatttggctgtgttttccttgttaggggtattcacccctgcaagccatttgtagactgtaatcggcttaatattgagcctgtcggcaactttttgaacagataaactactattttgaattaattgtttaagataatcagttctaaatttcaaatctgggtcatcagttttttcagctaattgagataagaaatctttggttggctgatatgaaggatcaagttcatcgggtgcaacatgtaaggctttagcgattttaaccaagttgttttgcggaatggcaccatttcctaaataatagcgattaattgatggaatagagattccagttagcgccgccaagtctcgttgagttaatttttgattgtataaaattcttttgagattggcgctagtaattgcgatgatggattgcttaagtttatctttcatgatatacccctttaaaaatttaaattttatgttgtaaatcattattaatatatcatttttgcgatacttttgtataagaccgcaagatattgataaagaaagcgagactgtaaaatagtttgtgtaaggatgaatgattccttaaatttatttctttaaacattagaaaaaggagttcctttctcgtatgattggtttgaacaaaaaaacacatacagaaagaagaactccttcatgaatgattttaccaaagattttgctcaagctctattcaatccagacaaaataaatgatttattgcgcaaagaactacaacaggctgttaataacttgctagaagctgaattgactgcctttctgggctatgatccctatgccagaaatggctggaatactggcaactctagaaatggtgcttatttccgcaaagttgatacgcaatttggcccaattgaagtgcaagtgcctcgggatcgcaacggtcaatttcatcagcacacgctgcctgactacaagcagcactcggatatcttggaaagcatgattatcaagctttactccaagggcgtgaccaccagggaaatagccgatctaattgaaaagatgtatggcagccattacagtccagctcaggtatcaaatatttccaagcagatgattccaaaggttgaggcttaccacaaacgcaagctaagcgacaagtttttctgcgtctatttggatgcgacataccttcctttgcgccgagaaacgtttgagcgtgaagcagtctatattgccattggcattaaacctaatggacataaggaagtcattgactactgcattgctcctagtgagaacattgaagtctggacagagatgcttcaaaacatgaagtccagaggcttgaagcaagttgaactctttctttctgatggtgttgttggcatgaaaacagccttggccaggacttatcctaaagctcattttcaacgctgtttggttcatgtcatgcgcaatatctgcgctaaagtacgcgtcgacgatcgtgaaaagatcatgaacgaattcaaacaggtgcatcaacagacaaacaaagaagaagccacagctgtcctgcatgacttctataccaaatggggcaaggtttacagccatgttatcagaagcttgaaagacatagaaccagatctgctggtcttttataactatcccaagcagatcagagcttcaatttattcgactaacatgattgaatcatttaacaatgtgatcaagcgcaaagctaagcctaaggcagagtttccaactgaacagtcgcttgatgcttttattggtattcaggcaatgagctacaatgaccgttatttcaatcgaattcataaaggctttggtcaggttcaggacaccttagaatcctactttgattaaataaataattaaaaaatcaatttacgagaaagaactatttacacaaaagatttgacagtttcaagaaagccttaattagatggatgtgaggttgtaagaatgaatcttaaaaataaaaaagttatacaagacttgcttaatgacaaaattgatattcaagaaattgaagatagattgtttgtcattgcgtttcttagcatggcagataatcttgaactagatggacaacgacttagtagtaagcagaagctagagttaaacagctatttagcaggggaagcattgggcttaatgggaaacagtccagaagtattaagcaatagaatttatgacccagactatctggcaaaaatgggtaaattgattgagaaagcttttgtagattatatgaatatgtcgggggttcatgatgaataagtatgatttatatccaggaatgataactactcctgcagaattgtctaaaattttcacttggcgatttagatatgatgtgcttggaatgcaaccattggatagcaatagtttttatgttcgtgttaaacaacttaatgatcaatctattgacattaaagctaatcaaaaaattaagtatgctggcgagggaaaatggctagtagtagttgaaaggagctagctatgaaattatttttaggcatatatttggcttactttcttacgagtttgatttggatagcagtagtctttaacaagacagacgcagaagaaaagtatgttaatagagttaccaaaagaggcaaacaaactgtgaattataagtctgtctcgcttaaagtaatgaatgttgatatgaatcaaggatgttctatgcttgaattattatcaaatgatcatcattcttttgaggacgatccccctatagtgattaaggcaatcgtacctaaaaatcaaataaaagtttttaaggctaagcaagcaaagcaaattgaagccgatttgcaagtagttatcaatactagaggtaatattcctcaagttcagacaaaggtaataagagtttattaatgctaaggagaacgctatgtttttagtactttcacaaacagattggttttggattatggtttgggtctttattcttgcttcagcgttccatctttggaagtgggtttgggtagtcttcggaatatacctgatttttccagctctgttaacactgatggatggtttatggagaattgcgctggtaattggtgtgatttttctaggaattaaatgtgtatctatggggatcacttggattaaacaaaaaataaagcagaacaaggaaacaaagaaggtaaaagcatgactaagataattaggcttcatccatatggttcggagcagttaccaattttaggaatgaatgaaatggatcttgaaattgatgatcaaatttttatgtctatgtatcatgaatatttagctcaaggtggtactgaaaaagattttaaagaaaagcaggcagcttatattagtcaagcaatgagtggattggaaagtcttgtgatattaagaatacaagcgataaacagactgtttacaataaaaacgatatttgatataataaataagcaagggctatgtaattgcccgtgcttagcaagttaggcgcaactttatactcaatccccattgatgctactaaagttactcctactgccatttttaatccgttagggtcacctagcggtttttttgtgcttaatgtaaaaattatgtatattattttttgtcttgaaatatcgtaaaaacgatatataatataaatatcaggaaacattttaaaagaggaggagaaaaaaatgattaatcaagttgtaattgacggctacattggaaaagaattggagttaaagacaacccaatctttaaaaaagtatgtagcctttactatttgtcaaaaccgttatagcaagattcaacaagactatattggtgaatggcaccatgtaattgcgtggaataaagtggctgaaaatctcgttgctaaagtacataaaggcttaaaagttattctagctggtgaacaaaggactagaagctttattgataaaaatggtaataaggttgcatatgaatatatctgggttaattcatttgatgttttaacaagtcaaaatgaagagtctacaaaagctattcctcagaattcaaatcaagcaaatgatgaagagccagaagctgaccgtaccattgtggaagcaaacaaaaaagataaattggcagaagaaccttttggaagtcagaaagaagtacaactaacagatgctgatttaccattttaataaagataatgcgattggtgagtattggatgacaaaaaaatcagtaaaaaatagacgctttagcgtattcagagtggaaaaagaagtttatgaaattctgacgatagatgggtaccattactggaatattgacgggttatttataaaaaatccaaaaaattttttgtctctaaagtcttataaatacaatactggatataaaaaagtaactttttatcgagtaagtgagatttatgatcaaatttatttaggctttggatttgaagtaaatcctaaattaggacatcgcaggttattgtgtaaaagaaaatatcctgaatctcatcataggaaaaagccgctaattgatgttagcaagtaagatattatgatcagttcatttatattagaacattttcgatacatagtgatcgcatttggagcggggaatttattcataattattcttatggcaatatcatctttgccaagtttagcaggcacaaggtttgctaacttttttgaaaaattggatgaattagtgacagttctgctatcgattcttggaattattctatggatcatgattttatttatcggatattactggagctatttaatgtaaaactagggcgtaatttaataggtaaaatgcaagttggaatgaatattggttaaaggagttgctcctcttttgaatcaaaaagttgatattcatatatatccctatttttaatactttaatactcaatacttaatacttgcaatgaaagttcgaatctttcgaaactgtcaaatcttttgtgtaaatagatctttctcgtaaattgattttttaattatttatttaatcaaagtaggattctaaggtgtcctgaacctgaccaaagcctttatgaattcgattgaaataacggtcattgtagctcattgcctgaatgccaataaaagcatcaagcgactgttcagttggaaactctgccttaggcttagctttgcgcttgatcacattgttaaatgattcaatcatgttagtcgaataaattgaagctctgatctgcttgggatagttataaaagaccagcagatctggttctatgtctttcaagcttctgataacatggctgtaaaccttgccccatttggtatagaagtcatgcaggacagctgtggcttcttctttgtttgtctgttgatgcacctgtttgaattcgttcatgatcttttcacgatcgtcgacgcgtactttagcgcagatattgcgcatgacatgaaccaaacagcgttgaaaatgagctttaggataagtcctggccaaggctgttttcatgccaacaacaccatcagaaagaaaaagctcaacttgctttaagcctcgggatttcatgttttgaagcatatctgtccagacttcaatgttctcgctaggtgcaatgcagtagtcaatgacctccttgtgcccattaggcttgatgccaatggcaatatagactgcttcacgctcaaatgtttctcggcgcaaaggaaggtatgtcgcatccaaatagacgcagaaaaacttgtcgcttagcttgcgtttgtggtaagcctcaacctttggaatcatctgcttggaaatatttgatacctgagctggactgtaatggctgccatacatcttttcaattagatcggctatttccctggtggtcacgcccttggagtaaagcttgataatcatgctttccaagatatccgagtgctgcttgtagccaggcagcgtgtgctgatgaaactgaccgttgcgatcccgaggcacttgcacttcaattgggccaaattgcgtatcaactttgcggaaataagcaccatttctagagttgccagtattccagccatttctggcatagggatcatagcccagaaaggcagtcaattcagcttctaacaagttattaacagcctgttgtagctctttgcgcaataaatcatttattttgtctggattgaatagagcttgagcaaaatctttggtaaaatcattcatgaaggagttcttctttctgtatgtgtttttttgttcaaaccaatcatacgagaaaggaacccctttttctaatgtttaaagaaataaatttaaggaatcattcatccttacacaaactattttacagtctcaatctttccgctctaatctagtgagggaaaatatgtataagttaataacagtcgcagtaggtatttatattgtttattacgtctggcgagcgtattcaaacatgaaaaatttgaagaaaaatatggatgataatcctaaagaactccttattaggtatgataggcaaattaatgatttgcgaaaacagttaacagaagttaatgaaacaatcgcaagaaatcagggcttcccaccaagtttttccgttaatagggggcttaagaaagccaagaagcaacaagaaaagctactgcaacgaattacacaaaaagaagttgctagaagcaattatttgaaattattgagaagctatcaagaaggaaaaattgataaagcagcattgaagaaatgggtaaacgaaaatcagaggagatgataaacgtgaaaaagtttagcaagtttgctttaactgcgttagctgtgacaggagcaattattgtggcagtagtcgtgacaaatcaagtaaaagaggcaaaatccttagaatgttaatcattaagaaagtcggtacaattattgatttttgatcaataatttagctgttcaactcagctatttcttttaggactggtagacagtccactagtacattgaaaacagaataagcgtcaactatgctctgcaacgggtgtaggacgtgtgcatgactattgagccgactcaataggatttgtaagacagagaattgaaggcacaacgggtggaagaagaaagaatcacacctgccgagatggagatagccgtccatcaacaaagattactattatttttggcttgatgataagtcttagtttgaacgaaattttaaatttaaagtaatagtaatgtctgtaataggctactaaaagataagcatacattctttttggctgttttgacatgtgaataccttgatgaaaaactcaagagtaaataagaagtcggaatgtgatcaacaatagtaagtgagtcgataaacttaactctttaagtgttgtagtaactgaagggcaagaaagagtctttgattaggattgataagaggacagcttgcggaatgcgtgaagcgagaggctagagataggtgaagctatctgctacgtactgtacaaaagcttacagtttggtggctaactagaaaaccatcatcgttatcggtcatagcgtaaaaccgttggtaattaaagagatcacaatttaaatgggattaagatgaaaaattatgaataattttgattgcgttgatcgattaattgatgtaatgaaaaaaatgaatgttacaataataactgcggatgaatatgtccgctatcgcaatcaattagcaaaggaatatcctaaagaattcacgccaataaggcgaaaagaaacattagcattacgtgcattactttcccgaaagaatgatcaagtgaagttatcttttacatatgatcgttttggaagatgtacgcaagagtatattttaaaataataaaaattaacggatatcccgctgctataatgttgcgtatgtagtataatgaaagcaggtgagagcggggaaaagttagcgagtaatttaagctgaattatttgaaggaaagaggagcaaattatgtttatgaaaaagaatgtattagtaagtttatctgttgcaacattgttatcagttggagcagtaggtgttaatgaagtaaatggtgttgctaataatacaaatgttgtacaagcagcagtaaaaaatggcaagcttactcataatgcctatatttataagagtaatggcaatcgttatggcaagaaagtattgaagaagggcaaaacagttaagattctcggtacaaagaagatttatggtaagaaatactaccgcattggtaagaatcaatacgttaaggttgctaattttgctaagaagaccagtaaagctaatacggctagcggtcaatattatttaacccacaatgcttatgtttataacgctgaaggcaaaagaatcaagggcactgatactttaaagaagaaccatgtctttactgtagttggtgttaagacaattaatggcaaggattacttgtccttaggcaatggtcaatatgtgaaagctgcaaatgcacaatcaacctcggctgaaggtgctaataaccaagtaaacaataatgctacggatactgcagtaggtaatactactgataaatctacttcaaattcaaataatagtagtgaaaataaacataatagctctgattctaaatctgcagctgaaaaagctggggaaaaaggttatatttactttactgatgatcaggtagcacaaattcaaagctatttgtggcaaagaatcaatgcttaccgtcaaagtaaaggttatccagcttataagactaatccagaactaactagttttgtaaatcgggtaatgcaaaagggtacacctgagtacaatgttgctggttatggtaacggtactattcaaaatactgataccttaggacaatttttgccaaaattaaaagcattaggaatggatagtgctagaagtatgactgatttagatgctttcgcatatggtaatctgaagcaatggttccttgatttaaaggcaaaagatcctaaaaaggttgcagatgaaatctttaatgtttataccaaacaagaagatggtatggacttaagaactcttgaaggacataaagataaatacgcttatgctgctttgaaagttaaatataatggtgagggagattatatcgatcactgtttggaattaaactttaccgttgtagggagttattcaccagaatggattaaggcttgggaagctgctaagtagaaattagaaataaaggttaattagttatgctaattgcctttttttgttcctaaaaatgaaaataaaaaaaagtagattagctattaatcaacagcgaaaaagtgataaaaagaaaaaaattggtacaatagtagctattgttgcactaattttaatcggggttgcgatttactgtattgcaaactttaatcatcttcaaggaaaagctgctaactatgtagcaactaatcatttgtcgagtcaaagaaaaaacaaacagaagaaaaagccaagttttaatatgaaggctgtccaacctgtatcacctcaatctcttgccaatgcatatcagcatagaagagattatcgagctgtaggacagatagcaataagagatcataatgttctattaaatatctatcgtggagttggtaatgtggaactgaacttaggtgcaggaacaatgaaccaatatcaaaagatgggtgaaggaaactacgctttagcaggtcataatatggatgatgggcgttcgttctttagcccattatatactgcaaaggtcagaggaaatttacctaatggaacaacaatcttactaacagattataagaaagtttattattacaagatcacatcttcacaatttatttcagtttataatttaagattagcttggaataataaagagtttaagaaaaaaccagtgatatcattgtttacttgtgactggacaggtcaaggcagactttttattcgtggtaaatacactggttcacaagattataagggagcttctaagtatgttagaggctcctttaatttttagaaaggaaaatgttatggcaaaacaagtttttgtagatttcgaattaccagaagctatgcttgctgatacaaataaaattattaaagagaagtttcctgcatggctagtagatagaaaagataaccgagtagcctcagttcgaattctgtgggctggctggttattccttaagtattcggaaggtttggctagcaagtatgatggacgttttccatatgtagcatatactccttatacagcggtagatagaccttatgcttttcaaaccgtaatgttggaaagtgaatatattgatgcaatggaaagaatgagtcgtttgtatccagatgtctttgaagataagactaaggataagaattatttcttggcaattcttggttatgcttgcttaagagagttgtatgacaataatattgaattacactatgatacagaaaaagctaatgatctcgctgatagtgaaaatgcacaacttgattatgcatggttagaagatggtacaaataaaccattttctatcaaaatcaagcaattatcaaaagacaagtaattgccaataattgtatattattagaaaacacctacatatgaatcaatgttttgatttgtgacattgacaaaaatgcaggtgttttttttgttaaattaaggaggaatagccttgaaaaagctatcaaaaaagcaaactagagaattgctatctgcattaggtgtaacagcaactctaggtagtgtgggcgtaggtctagcagtcgcaaaccataatgcgaaccctaatattgttaaggctgatgcagcagctgatgtgaaatatgtgagtgatgctactttaaaaaagggatcagatattgcttttgatatttactaccaagttccatacaatgtagatctaaagaaattggttcttttcgataaattggagccagtgtttactcataataaaaccagagtttttgatggtaacactgatgttactgatcaatttacggcagattttgataaggggacaaatacaaccaatatgacggctaagaagcctcaagattgggtaggtaagaagttaagcatgcgaattgaaaccacgttacaaaagaatgctaacttagacaggtatttggataagaatacgaatcaatacaacattcctaatgttggtcaaatgatctataacgatgaaaagatcaagaccccacctgtttatgttcatacaccgaatgatgaagaacctactgcaattaagcaagtagaggataagaacggtcaatatggtgaaaaagccaagcatgacgctggtgatgaattccattatcgagttcaatattcaattcctgaaaatggtaaagacattagtaatgttgttttctatgacgatttggaaaaggttcttgatcttgaagacgttaagatcaccgatgacaagggaaatgaagttactaaagaaggggatttaaaacttgataaagataaagaaagttttacttggcaaccttctaaagaatatctaactcaaatgccaaagcatatctacactgcagatattactgtcaagctgaagaccgatgcagatttaagtggttacttgaataaagcaacaaagaattacgaaattcctaatgttgctcatatgaagtacaacaataaagatattccttcaaatcctgttaaggttgaaactccacctccagccgaaaataaggtagttaagagtgttcagggactatcaggttcctatcatgaagataaagacaatgttgaggttggcaaggactatacttataagattgactatactgcaggtgaagggcaacatttaaccgatgttgagtttaccgataagttagaagatgtccttgaccttgaaaaggtagttgttaagaatgccgatggtaaagatattaccactgaacaaggtacacttaagcttgatgaaaagaatgaaagctttaactggcaaccaaatgctgacttggttaagattatgcctggcaagaaatatacagttgaagttactgctaaagtcaaagacaatgcagatttacaaaagtatattaaaaacaataccatcgaaattccaaatacggctcactttaaggcgaatggtaaagacacaccatcaaatactccagttgtgaccccaaaggtagaggaacctaagacgcataaaggaattgttaagaatccttcagattgggcaaaattctttggcaacaagtctgaaacttcctcagggcaagactctgatggtgatggtgcattgccaaaggattatcaaaaggcgcaggaatacgttaaggttgaccctaatactggtgtatggagcaaggcaaacgataaggtaacagacaagcaatatgaagaagctgtaaaaattcttcaaacgccgtacaagaatcctgttaagtcttcatcacaaaacgctagtgaagttactactaaatctccaacttctaaggaagatttgaaagaaattattaattcttcaacagtagatagcaatcaggcttcacgtggtgatgctgtagattatctgttgacgtttgatattggtaattctcaaaatatgaagtcacttgtattaagtgatgatttggaaaatgtgcttgacttaaagaatgttgtcatcattgatagtgatggcaataatgtaactaatgaaggtaagctagttacttcagatgaagatgaaagctttacttggactgctaatgatccagctaaattctcacgtaagaaactatatgttgcaattgcttctaacattaaaccaaatgcagatgtatcaagctatgacaatagcggtattcctaatacaggtcatatgcaaattaacggtcaagatattccaactaatgttgttcatactacgcttaatggtgatccaaagaaccctgaagatcctaagaaggataagcctaacaatccttctaaaccagatggtaagaccccagacccatatggaaacttggtaaataagcaagttaaggctgaatcaggtcaatggggtgaatcagataaggttcaagaaggcaaagactttgactacaaggttgaatacactgtcggtgataaacaagatgttaaatctgttgaatttgcggacgacttagaagatgtccttgatcttgaaaaggtaaccattactgatgctgatgggaatgatataactagccaaggtgaacttacgcttgataagaatactgaaaagttctcatggaagcctaaggctgatttagtaggcaagatgggtggcaaaaagtacactgctaacattacagctaagttgaagaagaactcaaaggtaaatggtgaaattccaaacgttgcaaacatgaaagttaatgatagagacgttaagtcaaatactgttaatgtaattccaccacaagcggataagaaatcaccaagtaatgtcaataatcctaagaaccctacaaatagctcagagaatcctaacaaccctaataacccagggtcaaacaatccaggaaatccaggatctgataaccctattacaggtaaaaatggattcttgcctagaactggtcactttatgatgcaacatgcgggatggtttattgctgctttagttgctattgcaggtggaattggtagttatctttacaagacaaatgatgatttcaaagaaaagatcactggaatcaagaataaattgattaagaagtaaaggagagatccaagtgttagacgctacaaaattaaaaaatactaaggtaatcagcttagcgggagcagcactggcaatcatttcattaggatttgctacaagtacgactgttaaggctgataatgcacaaatgcaagatttacctaagggagtcaaagctgaaggtgctaaaattccaggacggtatggttttagacctaaaattatgaaaggaattactaaggtaagtccttttggtggtacttctgcagattgggcaacttcatctacaaatacagaaggtaaatcacactcttgggacgcttttagactgaaaggtaatgacaacttaaagggaaagattggggtatattattctaatgttggaaatgaccctgtttccggaaaaacaattgatttaaaagttacattaaatgattggaaagttaatgcctataaatgggatcactcaactgatcccgccaaaaaggtaactctagaaaatccgtatgccgcatttggtgttgacgattttgaaatctttactcctggtgatggtgcacttgcttatcgattagattttatcgatcatgatacaggaaaaccactaaaattaaatactcaaatgacatttctagatattgatggtaaccaatgggtaggttttgattcttcaacttatagtaagattgataatgtttattatggtgatcaagaaggtaaaacgtgaaactgtcaaatcttttgtgtaaatagatctttctcgtaaattgattttttaattatttatttaatcaaagtaggattctaaggtgtcctgaacctgaccaaagcctttatgaattcgattgaaataacggtcattgtagctcattgcctgaatgccaataaaagcatcaagcgactgttcagttggaaactctgccttaggcttagctttgcgcttgatcacattgttaaatgattcaatcatgttagtcgaataaattgaagctctgatctgcttgggatagttataaaagaccagcagatctggttctatgtctttcaagcttctgataacatggctgtaaaccttgccccatttggtatagaagtcatgcaggacagctgtggcttcttctttgtttgtctgttgatgcacctgtttgaattcgttcatgatcttttcacgatcgtcgacgcgtactttagcgcagatattgcgcatgacatgaaccaaacagcgttgaaaatgagctttaggataagtcctggccaaggctgttttcatgccaacaacaccatcagaaagaaaaagctcaacttgctttaagcctcgggatttcatgttttgaagcatatctgtccagacttcaatgttctcgctaggcgcaatgcagtagtcaatgacctccttgtgcccattaggcttgatgccaatggcaatatagactgcttcacgctcaaatgtttctcggcgcaaaggaaggtatgtcgcatccaaatagacgcagaaaaacttgtcgcttagcttgcgtttgtggtaagcctcaacctttggaatcatctgcttggaaatatttgatacctgagctggactgtaatggctgccatacatcttttcaattagatcggctatttccctggtggtcacgcccttggagtaaagcttgataatcatgctttccaagatatccgagtgctgcttgtagccaggcagcgtgtgctgatgaaattgaccgttgcgatcccggggcacttgcacttcaattgggccaaattgcgtatcaactttgcggaaataagcaccatttctagagttgccagtattccagccatttctggcatagggatcatagcccagaaaggcagtcaattcagcttctaacaagttattaacagcctgttgtagctctttgcgcaataaatcatttattttgtctggattgaatagagcttgagcaaaatctttggtaaaatcattcatgaaggagttcttctttctgtatgtgtttttttgttcaaaccaatcatacgagaaaggaactcctttttctaatgtttaaagaaataaatttaaggaatcattcatccttacacaaactattttacagtctctaaaacgtggttatcctacatgaataaaatgggtaaaaactatatttattcagatgctaaccaacataatactgctttaccagatggttctggtacattaaagtcaaaggacttgtatggtggtattactaccactgtatccaatgcagatcatatgaatatcacttgggtgtatggtactaacactggtaaaaaagctgttgaatcacaaaatgaattgctggctaataatggttactggcaattaaatgattccaattatgatgcagatgcagataaaaataaaattggaacaattgcttcatcaatttggaatggtaattttaaccacgcatacttagctttcggtagtaaagcaattaccaaggataagccacttgatcctaagaagtttgtgtcagataaggatgaaggtactaatgttcctagtgaaattggtggtattaaatctgtaactcacgatatgctagagaatcgttatgaacaatatcactatcaaattgttcattctgtaccagatgtacgtgatagatttaaatatagtgaatatagaattactgataatttagataatattttgaacattgatactggttcaattcgtgtttataaccgtgaaaatcaagatgttacctatatgttcactgtaactttatctagcggcaataatttatcggtaatagctaagggtgatacattggctcttgatgatttctaccgtgaaacttataaaatcagcttcgatgctacagttaaaccaggtaagagtctaaaggatcacgctgatcctaagcataaaaatcaagccgtaattgataaccagtcaaaggtaattactgataatggttcagctgattcaaatattgttaccacgaatatcccgttcactaatgaaaaagacgaaaaatttgtatcatacgacggtttaggagatactaagtctcttaaggatgtagattttggtaagaaatatacttatcgtgttgaagctacggttccagataatgtagacattgattacctagcacttaaggatactattgaaccagaagttcaaaatatcaagggtgttaaagtttacgactatgacgacaagaatgctgcaggaaacgcaaaagaaattactgatcaaggtaaacttgaaatcgataataagacaggaaaagtgtcatggactgccaataatccagcaaattggcatggtaaacatttaaagatgtttattgatactactttaattaacacaccaaagcttttggattatttgaacaaggacaacaatatgattgaagttccaaacgaatctcatttcttgttcaataaagaagacattccaagtaatattactcacgtaacgccaaatacgccaaaggcttctgcagataagaagattgaggtttcaggcgattataccagtgatgatattgacccaacaggagatgggaacaagaacaaaaacactgataaagataataaacgtgaaactgaaacattacctaatgacaaagacgaataacgtataaaggattagatgaaatggtgagaaagtctaatccttctttttctttcgggtgagatggtgggcaatagttaaggaggaaaaatggttcttagcaaacaagacaagtccattttacgcaagctacataattcccaaggcttaacacaaaaggcttgggaagaaaaaattatggttgagtttgtgcaagatttgatctcaggcactaaaagcgcatataaagatgcagttttagaagtcgcaggtaaaaaagaattatccgagcagctggagaaactacagattgctgaacctgataagactttaaatgataaggttacgtcatcaaaagatgataataagcctacaagtgattttaatgggacaagtaaaagtatttagtttagctaactaaatgctttttttatacaaggaggattaacaatgtttttagctgtttataccaaattgacctacttattttggagcggcttaatcggtactcaggcttttttaaacgaacatccagttttacttagtgtttggagcaatattaataaggctactggtagtaccgaaaagaacctgaagagtatcgccaaaggtctgttcattgttgttattatcttggctggtattcttttcgcttttggtaacagaatgtcgcaaaatgcaaagcaattattgatgtatgcactggtaggtgttgccattgttgctttagctgcaagtttagtaccatcattcgcaaatatgtttggttggaatgctagatagttagttttgtaagtaaggtgaagtaagtttaacttactgggttgatggtgggcgttaaagaaggagagaagattatgctattagttacctttgataaggtaccaaaaggggcgaaaaaatattttcaatttaagcataaattaagtagaaaatcgcctgaattagacattaaaactgcagatgatgcagttaaggactatgcaaagagcttagaagaagctgattctaatgttacatttactatctttgatgatgaagatgaggatcgtgaagagagcagctttgaagcacaaattttacctgaggatcaagacgggggtattttaaacttgattgatcgtgatttagagaatgaaaatttaactcgtgatcaagaagaaacagtaacaacactaaaggatcaaatctttaatgaacttgaacctagtttgagtgatgatgaagaggacttaaataaagacaatgggttcatgtttaataataatcaaattctagattcagatgatgaagtgcgtgatgaaatacctcctgaaaatgatgtaaatgatgatactgaggataacagtccaacagaagaatcaaatagtaatgccgcaaccaatcctagtttgaataatgttcctacacaattacctgaagaggttgatgctttaccaattcaagcaggtcaaacaactgaaacagaaactagtcgcagtgaagtaattagctatggcaaatataccgatgccaatgatattcttgaccgtttgccaagaggatatgacaaaaatcaatttgctctaaataatattcgtcatgatttaggctatttagataatcctaaagatcaatatgatcaagcgttgaatgataaaattgatcaggcgttaagagattattcaatgcaagatattcaacgtgtatatgatgaaggtttagcgaaatcaaaggctgcaattgtagatagattaaaggaagcatataacagagttactaaagagtcactagataaaattgttgaaggcagaacagcggcacagattcaacagttagtagttaaagcaactcaacagaagcaaaataatcagtctgacttgagcaagttaaaagaaaataaggcattagaactaaaaactaatgatgaagcagcattagctgagtataagaagcaattagaggagaaacgaaatttagctctaaaaaattttaatgatcaagaagaacttaaaactcgtaatgctaatgaacaaattgatgagcaattaaaggctgataaagctaaagtagagcgtgttgcgcgtgatgaagaagtacaaaaacgaaattctgagttagatgatagtagaacaaccattagtaatgattttgatcatgcagttagaaataactatgacaagaataatgatttatttgaagacaatttaaagaaggttcaagaaaaagttcgattagctaaagaacaaataaatcaacaaaagcaacttgatcaagaaaaggctgaggaaaagcgtcagcgagaagcagaagctgctcgcaaagaacgtgaacttgatttaaagcaaaaagcaattgagcagaatgagtctttagcaaaattgcaacaagaaaatatggcaaagttgcctgaggaatttgcgaaagcaattgctgcagcaattactcaaaataatttagaaaatcctaacgtaaaaattactttaaataatgatggaaagaatgctttagtgcctgtgccacatgttgatggtgaaatagtagacttagatgatactaagaaaaatgatgcaccaattgattctgaatcaaatgaagaagattcagagttaaagccagaaaccgaggataacagtcctaagaaacatcactataaatctgaaattatctcattagtttgccttgcagctgcgactttgggtggtacatgggcttatactaataaccattctaataatgaacaaaaagcttcaattgaacgatcaagttcaaactcgcatgtcaagaaaaacaagcaatcaagtagtaagcaatctgctaaaaaagatattgctaaaaatcaaaaaactaatgctaaatcaaagactaaatctactccaacttatttaactaggtcacaagctattttaaaacaatatcgtgaaactaagacttgggcacaaaagagagatatgctagatggtttattagggcaaggtgacgcaagaaatttaaagaagattgctacaatatattcaaatccaattgctagtttgtacagtgccattgctaatgaagacaaagctcagacaagggatatttggctaagtttaactgatgatcagcgaacagaaatttccaactcagctaaaaaagctgtcgcattggctttctatgatattgctgattggcaagatgggtggttagctagatatgcgtactaaaaaaagaagatcacgaataaatctaaaaaatgctagaaacaaggaaaagaatcttgtaaaaaagggcttgtatcaagttgaaagacaattacatcgtcccaaaaatgaaaacaagcagtctagcaatattaattttaattatacgaagctgataacaacgttggttataggaatttttatctttctagtaataatgtggttattaggagcattccataatgtcatgttacaaactaaaagtaaaaactataacttattcacgaatggtctcgatttagataaagcgggattagctggcttgaatttctttaagacacagttgaagcccatggaaattttagaggtatttgctgctagcgtaattattggtggattgttaagtcaaaaatttcactttgaaagtcaaaaagtcgctcatgggcaaaagggaaatgcccgttttactacagttaaggaattagaagacacctatgtaaaagtgcctgatcatagtcaaccagggttagatcctaaaaagcctagctttaatggttttggtgggtttcccattgctcacattaatagattaggattaaccccaaaatttccatttattactaaacatggctattatttcattgatacaagtacagttcataatttgattgttggtacttcacggtctggtaaaggtgaaactactatattagaacaaatcgacctagtaagtagggctgaaaaacaatcgtcactagtcgtgaatgatcctaaaggagaactgtatgttgcttctgtaaatacgttgaggaagcgtggctatgatgtttatgaattaaatttagatgacccaaacaaaggaatcgcatttaatccgctacagttaatcattagaagctgggagcagggtgatgttgaaggagcaatgcaattagttaactcaattacctactcgctttattttgataaacaagcaggtcaaaacaagtgggttaatgacgacgcacaatcagctgttaatggtatgattattgatattaagcaaaacaaaatttaataaatgtcgatatatcaatgcttaacagcaataaatcggcagtaataactatagtgaagagactttttacggaaaaattacgtaaaaagctctttttatatatccaatttgttgatcgattccgcaacatgctcttcattttcctttgtaaagtgagagtaagtatccatggttgttgaagcttttttatgaccgagcaagtattgtatatctttaatgtttgcattattttttctattatttagtaaagtagccagtgtgtgtctaaagccatgaggagtgattcttcgtagcggatagttgttatagagcgtcgtaatccaatgatctggtgcgctacgctcataaaaatcgccattatctttgtggaagataaaatcattgccttttttatagattgtttcttctttatactcctttagtactatagccaactgatctgataaggggactttgcgaacggacgcaggtgttttggtaggaccatagattttgttgccattttcatctgtactgatagaatgctgaataaaaatttccttgtttttgaagtcgatatttttccactttaaagccagtgcctcacctgggcgacagcctaaattacccactgtcataaagtaaacgtaatatttctctttatactttttggcacattcaagaaatgttttcaattcgcttaaactatagaagttattagcagggtgcttactttttgccttcgtttttttaggcatcacaattttatcaaaagggtctctgtcgcaccaatcacgtagaatagcatacttaattactctgtgtaataagtttaaaatagaacggtaattaatatgagtttccgccaatttagtagcaaagctttgtaagtggttaatatcgataccgtcgatatatacgcctccaaattctttctctatgttgttcttccaattagatttccgagttcttagcgtagacccacgtacatcggctctataaacttctagccaaatctcatatacttcttgaaccgtttttcggttttctttctgttctttcttatgagtaaacttactaggaccctcttcttttagtttggtcttagctgcttccgcttctttgtagctgtcaaagccctggcgagatggcttaactgccttaccggtttctggatcagttccaatatacgttttaaatccgtacttgaccttgcccgacttcaatttgtacttgtagatctcattgtcttttctacgaggcatatatcatcatcctttcaaactaacgttctaaccaactgtgtaataaatcctgcttacctgaatagggtaggcaggatttttgttttctattcgtttttgaaccagttcgctgattgtcttaaagcaacccagtgaccacgccagccaccgtatacacgccatgggtagtcatgaccggaatacataaccttcaagtctgatcctttctcaatgtaagtcttatgagttaacttactttgatacatataacgtccaaccttgaccttatatattggtgtttccttggttacctttacccagtgccagtggtgtgagtacttgctaatggcttgtacttgtgttgaatgactaggtgcgataactgcaccagtaccgctggcaagcattacagatgccaatgcagctactaaaaatctatgtttcatttttaagccttctttactttggtaaatgatccatagcgtattgaacttgttctggggtgaaaccctcgccaccatcatcaacactgccacttaattgatcttgtacgtctgcacgagataagtgttcggtcttttcatattccttggcacacttcaaagcattttcattccagttaacttgaatgtggttaacagcatattcaccagcagcttgtgtaaaaccttcaccgtcttttgaagttaattggtcaagcaagccagccttactcattggttggtcttcgttgtattcctctgctgtggctaaagcgttcttatattcttctggaacctttggctttgattccttaggctttgactccttagattgagtgcttgattcagttttagcagacttcttatgcgatgccggtttcttcttggcagtttgctctgtctttgctgaaccgctgtcagaatcatcatcgtcatcatcacttaaagcaccgccagcgataaagattgcaacaatcacgatgataacccagacccaccagcgcttataccaaggtttcttttctttgacgacataggttttgccatcttcaccttttatttcctttgccatttctatatcctccataaactaggcacgaagtttaacgtcattggtgccaattaccctggacgaattattcacaatacttttctagttcttccttaacttgaaaataatctttagttcccagactgtcagccaagttaacgtagttgatattgatggcatcatagccttgatttatatagctctttatttcttggtgaatcatgaatttgttggcttcatgttcactgatagctcttgaccttaaattgtgcttataactgccaagaacttccttgtcgtgttcgtagtgtcctatctcatgaaggataaccttttcagtttcctcatcgcttagattctcattaacaataatgtagtcttttttgtttcccttagttctgactagatatcctttaccgtgaataggcaaataagcaactcccaaataatttcttttaagtaatcttttcaaattactatccatataaaacacctacttgtcagcgtatagtccttttaagaaagttgtgagaagttccttgtcatgttcatcgaatggcttgccgttataactgcggacgttgttaagcatttcagccaagtcatcagaggataaattggatggattaggctctgggtcgtcagtcttgcccattaagtaatcatttgttgtattaaataaagtagaaatagcgccaatagtgtttatatctggctctcttttaccatattcataatttgcataagtagttaatggaagatacagtctgttagcaacgtatgttttagtccagcctgcattttctcgcattgtctttagtcgattaccgaatacactcataactgcacctctttgttttcttctctctctgagtatattgtaaattcttatttactatttgaaaatatttcttgtcaaaaagtaaagaaaaatgttgactcttctcaaaatgggtagtaatatataactgtaatcgagttacacgaaatgagaagaaaggaaatggtcggatggcaagtgtcttgaaagacaacgcaagagcattggctaagcaatacttgcgtgatcatggcattaagcagagctggcttgctgataaattgagaatcagtgagcctacactaagcggaagacttaatggaagatataagtttgatgctgactttgcggtagctttttccaaagcattaggtatctcaccagatatttttttgaaataaagttacccgttttgagaagaaaaggagtgcaaaaatggaagaactaatgaaagttcaagtcaaaaacgatcgtcaacttgttagtgcaagagacttacataaaggtcttggactaaaaggaagatttagcagatggttcaaaactaattcagaactattcactgaaaatgaggatttttacaagtgtacatcaagtacggttgttaacaacggcgctgttcgtgagttagatgattatttattaaccattgaaatggctaagcaattagcaatgatggcaagaacagaaaagtcaaagctttatagagaatatttcctagacctagagcgtaaatggaacagcccagaaatggttatgcatagagcattggaattttcaaatgctcgaatcaaacaactcaaattagaaaacaaaaacttgagtatccaactcgaagaaagtaacaaaaaggccagttatctcgatgtgatccttggcactcctgatctactagcaactactcaaatcgcagcagattacggatacagtgcaatggcatttaacaagcttctgaaatctgttggtattcagcataaggtcaacggtcaatggatcctttacaaggcatacatgggtaaaggttacgtagcaagtaaggcattcacttttcaagatcatcgtggcagagatcgaagcagaacgacaacttattggacgcaagcaggtagaaaacttatctacgacgttctaaaagataacgacattttgccactgattgaacgtgacgacattgcataggaggtgattgaaatgaattgctacaaaaacatacgcgaagaacttgaagcactcaatgaacttaataattcaaaaacagagtttggaatggttaaagagttcgatggcaacggtggtgttacacgtccagcaactatcaaagatcttcaagatctcaacagtgaaattatcgcaagcatctgtgatcaacttggaatgagtgacatctgtctaggaggtaataaaaaatgacaattctagcagctatgtccactaaagaattgtggtcgaagttatgcgacttgcttattcaaagaatggcactcgatatcactaaggaagaatgggaaaagttaacagagcaaaccaacaagatcgatgctgaattgaagcgtcgtggtgaattacttagttaggggtgtaaatcatggatttactgacaagcaagaaatgatggcaaagctgaaaatcagccggtcgacattgatgagacgtacaagagattgtgaacatagtccctacaaaaaagcagttattcatgacggagcacgaagattgtattaccgcctagaattgtgggacaagttcatggaatacagaactgataagtattacgaagaaatttacggaatcgaatcaattcgagacaggagcgtgatctaaatggaaaagtttagtccagagcaacgtgaagaagtcagaaagattgttagagaagaaataaaaaaagccaacatgcaaagcatatcagcttcaaaagttgccgagattactaaaaaagaaattgaaaagatgggagccgaatttggctctgataccacgatctattaagaaggtcagcaatgaaaaatttatattttattttgattttaacaataagtgctattgctatagtgcttgatcgaaaagtgatcaaaaagcaaacaggttttgcattaagctggccatattatttgtacgttttgttaattgatcttactgtatgcgttcttttttacatcatttaaaagattaacagattcattattaatgtgtttggtgatcgaaaaccaggcgcttttatcatcaatttgcgaaagctttaaccagtcttgcattagtttttgataatcgggtgaaagatatggtagcaacttagaaccgctttttacaaattgatttctggcgttggcttttaattgccagccacccgtttgctcatatgtattaagaacgttagcagctgcaacgaaatttgtaactaaatcattcaaagtggaaattttatcttgtgaattttgaaaatgtttagttttaatttctaattctctcaacttattactatgcacattgttaacgatagttactatgacgggagaaattatagcagcaatagcaatcacggcagttatagtatcggcatcaaattttatattaaatcacttccttattgaaggctgatttaattgtagcagattgaaggtgataaacgatgcagcttctagacgaagaaaatttaactaagtttgtgagatccattgtgatctcgatgaaaccagaacttaaatcaaatctagataaaaaagacgtgaaaaagataatcgagctgtcctcacgtgagtggctcaatgttggtgagtcagcaaagtaccttggagttagcgatacaactttcagaagctggcgtaaaaagtacaaaattccgtctcggacaattgaagggatcacacgatggaaaaagtcggatttagataaattttggaaaactcgtggagtgaaaggttacttatagaaaaatgactaaaaaggaaattgaaagaaagtatggaaaaacaaagctggatcacgcactgagttacttctgcatggcattcgagaagatccttgagtttctatcaatcatcttcgtaccacttctagtggttcagcagaccgtactgtatggcgagaaccatccagacgtagttttgccagcattatcaatcgtaacggctttagtaattgtaattggtgcattagtcattaagcacaacaagaaataggaggaaacatgaaattatggaacagatttttaaatactttgtatctcgtagacaagcccatttccttagcgctgtccaacaaaattgccttgctaatagcaattgtttgcatgttgctagcgggagcttttctgaacttccagcctacatcaagagttttttaggcataaaaaaagccctttagctttgcagagctaaagggacaaagaaaaatatctttaaaccaaaaagtaactaaggagattataccacaatgctttactcacaagaacaaattaatcgcaagaaggaattagaagagcttgaaatacaagcagaaaatgaccctgacacattagttgttcagttgcctgaaggccgtgaggctttaattggcaaatctgctgacgacttcgtaaacggctataaatctgcagctcaatttcttaaaggacgtttaaatcattacaacggagatttaaacaagttagcagatgaaatggactacaacgatgtttcacctaaccattttgattttattttagatcttagcaactacggtgatgatcttttgaagtttatcgaagattcttataattgccaaaaattaaccagttatttaggtatggaggagtactaatcatgaacgaaaatcaattaattaaattagatgaaaaggctgtagcattcccagtcaactttgcacctgcacaaattgacttcagtggatataaccaaatgaaagatcaaattgatcagttacatgaaagtcttgaaaactatgatgtaacgcaagacaacctaaaagacgctaagtctacccgcgcaaagctaaataagcttacaaaagcaattaaggcacgcaaagttgaaattaaaaagaaagctgaagcgccagttaaagattttaacgataaagtggaatcgttagtggctaaaattgacgattcaagcgcaaaaattagtgctggtatcaaagtatatgaagataaggcaaaagccgaaagacacgaaaataatttagagcacattaagacgatgtgtgaatttgctgaaattgatcctacaaaaattaaatatcaatcaagctgggacaacaaatcctacagcaaaactaagtttgaaactgaagtcgatcaacaaattgctttgattcagcaagaacaagctcaacttgctgacaacatcaagatcatcagtgaaaaagctgaaagcttaggtttgcccgctgatcactggatcaaagcactagataataatcctttgtcattcgtacttaatgcaatgtccgaatacaaggaagacctagatgccgtctctgaagctcaaaagaaaaccaagttgaatgaacttaacaaccttaaaaagcaaggagataagtacgttgatcctgaaactggtgagatcaaagacaaggtgatctcacttaagttggaagtcaagggtactccatggcaaatgaagcagctacaaagtttcctaaaggacaacggtattgaatatcaaggattggagggctaatcatgcaattattagaaagcccagccgactggattggacaaatttgcttcaaagctatctcaggattgaagccagaagatgcattgaaggcaaaactggctttgatgagtgcatttgttaatgttcaaagaaagctgcaacagccaagtaaagataaacaaggttatggctataaatatgctgacttgaacggagttatcaaagctatccaagaagcaagttcagatgaggacatcgcttatattcagcaaccagtaaccgatggtggcaagaccggtattcataactacttgcttaatagtaaaggtgcgatcttcgacttcggttcttatatgttggacatcggcagtcctaatcctcaggaatacggtaaggcacttacttacgctcgtagatattcaatcagcgctatctacggcatcgcttctgaagacgacactgatgctaaggagtttaactctaagcctgactacatgactcctaaggagcttaaaggcatgacaattaattatgatggcaagcgtaaagacttaactgaagtgtttgcaatggctatggctggtgatgagttagcaaagcaagtaatcaaagacaaaggcaattcagttaatgcgaagattgctattaagagtatcagcgctatttatgagttctctaagggcttacttaaggatcgtgataaagaaaagtcaaaacaagatgccgaagatcaaaaaatcaaagaaattgttgatggcaagaaagattcaactaagaagaaagatccatttgcaaagctaggtgagtaaaatgaatcaaccaagttattactcaataatgccagcatatgttagatatgataaagatcttaaacctaatgaaaagcttctttatagtgaaataactgccttatctaacaagtttggttattgcacggcttcaaacaattactttgctccactctatgatgtcagtaaagaaacggtatcacgttggataagtcatcttaaaaagaaaggctatattcaagtagaaataattagagctgcagataaaacagtccagcaacgtaggatatacgtttctgtggaaggggaggtattgacaaaaagatcaatagggtattgtcaaaaagatcaagaccctattgacgaaaatgtcaaagagaatattacaagagataatactacaagtaataatattaattcttcttctaataaatcgaaaccctcccctcagaatgaaactgtggataactctaaagacaaatcagaagaagaagaaacaaaaataaattcaagaatgaataaattatggttcactatcagaaattacaataagacattcaatcagcatcttagacctacactaagacaacttaaacaaatcagattaaaagtttctatgttatctgatgatgactttgaaagtcttagcaaagtatatgatcagcgtgtttcagcatacttggtgaataacccaataggctacttgataacaatgctgaatgatgaaatcaagattgagaggcattacaagaaatgaatagacttagaaaattaatcacgtcagccgaccagctagttgacggaaaaaagtactggttgcaatccgaattttctcttacgaggtacgaatgcagattttgggaagttgacgagcatacagcatggttcactacctatgcgccgcatgctaggtttatcggcttaaccgagttgcttagaaacaacggagatattccgttttaggagctaaaagatgaaaaattcaaagtattggcatgatgagccagttttccaaaataggacaccagaatatttctatggctataaatgcccttattgtggtgctaagttaaagccaattgatgaaattacgctcctttgtaacacatgcaataggttttggtttttccaccatttgcaagaaaagggaacagaagactggtaaaagtaaaaggagttaaagaaatgacagataaagaaaaaagtaatgattgaggggtgaagattatgaaagttaaattactctggtctcattttttgcctgatttggataaaaagattaatgagtttattcaaggtaaaaaaatcatcgatattaaatttacggaggtggtttcggacgactacggtaagggcgattggtccgcactagtgatgtatgaagaaaaaagaaacagacactttaaacaaaaggaatttaatatttctgatggcgaggaccccaacgaattcataaaagttcatgatgttgttaatgcagtaacccttaaagatgagaataacgagctagtaacagtagtaatttatgaggatgaagaaaatagcagataaagcagacaaatgaccggcttgtagaaagaaatcatgatcttactagaactttgaagatcatgatggaaattaaaagcgataagtagcatatgaacagttacaggaagagctttacaagaggagcataaaaatgaaaataactgatagacaaatggtaattgactatttaacttctgctgcacttgtatctagtatgaaagaaatagaaatagataatcaaaaactaactagacaagatcaataagcggttgcaattgacttgattaatagagctttagttcttttagatgaaaatggtttgataccttttcttgaaaatattgatgctaagaaaaacagaactgatttcttaatgaatcttgctatgaggtcttttaattttgttaacaataatgaagaatttattagccctgatgaagaagaacatgaaagtcacgatttatgatggcgactggcggggatgcacttgttgactatgtgaaagcacatcatgctcttgtgcctgtcgactttgatcacaagtattcgaacatgagtgattacttgaagcaaaatatggaggattactaatgcaagcagataaaagaaaacgacagatccaaatgagatcaaatgacattatgaagtacacagcagtgattaactcactgctcaccgtcggtgcacagaaaagtaatccacggtattgcgagatcagttgacgatgcgctaaagattgtaaacgaaggattaatcggttatggctatccagataccgataaaaaggagtggtattaatggagatggctgcaattatacttaaaattcttttgatcatcttatttatgggcttactggtgatgacttttcttatgtttggtgcagttgcctgtgacttatttaaaattattagaaatcgaaaatatggacgtaaacggaaggaagaaaaatgatatcaatttggttcttttacacaattttgccattagtgatgatgcttattgttttagccacagcatcaaataaaatttgggcatttatttcaattttgccgatctggattatagcagcggttattacttacttcttgctaccgtcgagaaatctgctgagtattctctggggtaatacgttttatgggatattttatttaacgttagcttctcaggcttatgacgatgatgacgatgctagttcaaagtttttaatggtgggcatccccgtcttagtgattttgttcttagtttgtataggcggatcattgcactcacacatgtctgttaagccaacatgggattctatatctaaagaatattcaaaaagcacagaagcgccaacattcaagcgcaatgaaactccaattgcattagcacctaaaacagttattaaccgtgttagaaaagcatcgtctgatattccaaacacgcaatattattcgatttctgatgaaattcaatcacagtactacaaaggcaagccagtttatgtgattccaattgaatataacggattttttcaaagcaatagagctggtgagattcctggctatttcatcattgatgctactagacaaaatgcaacaccaagatttgttaagaaaccttattactacgcagtaagtggctacttcaacaaagatgcgtcacgtcaaatctaccgccacaatcctagttggcttagtttagatacgccacaacttgaaattgatgacaatggtgatccttattgggttcaaacagtttacaagtcagaaccaatgagccatagggttaacttcggcagattacatgtggctgtcctaaatgcaagaaccggtgtaactaagacttattcagtgcacaacatgcctaagttcattgacgaaggcatcacgactggcattgctgataagatcaacaacgattttggtaaatataagtatggtttctggaactggagcaagaccggcatcatgaagccgaccggaaatggcgttgaaaatggtgtaacttcagtcttcaacaaagatggttcgattagttacttcactgactttactactgatagaaccggtgctgattcagcattaggttacagcatgatcaatgcaagaactggcaagctcactttctacagaactaacaacattatggacagcgatggcgctaaaaataatgctgatcaagactacaaagctcaaaaatggcgtgctaatatgccaattctctataacgtaaataatcgtccaacttgggtaatgactatcctagattcaactcatgctattcgtggctattactacttagatgcaagcgatcaaagcatttatggaactggtagcaatccaacaagtgctctggattcatttagacaggctcttgttgattctggctcttcggcaggtaacacaccaggtgaaaagaagaaaaacttctctggcgtgattaatcgagctgcagttgtttccaacaagaacaaggcaatgttcatgctgaagggcaaaaatatcattttcactgtgaatactaatgattatgattttgccaacttaattagacctggtgacaaggttaagttctcagcaaatgttgttaagggcaagtcaattggtaacgtcaatgaatttgaagataaaagtttagattaaggagattatcagttgttagtacttggtgtaggagaaacaatcacggatggcgttcacatctatcgtttagaagacgatttgaaccttcatttctggaagttaggcaataaagctgatcattacgtaagtacagcaggcttgaaattgcgcttagagattcatagtgaggataaaaatgaaaccaattgatcaattaaagtcagtcttagctgagagtggttatgatgtcatcaacgaagacggctataaaatgctagagaatgcaaaagttattaccaccgttgaacaagccaaggtcattgcacaattggttaaggacattgccgaagccaattacaatgccggttattataaaggtagtactgatcaagcgtttgaagatgggaagaaattaggagaaatactcaataagcaaaataaataatgatgtgatgtagattttaaagtttgaagagatacaggagtgggacagtgtttttatttgatttaccagacgaagttttaacagcagaaaatgtagatgattttctcagcagccagattaacagaatggaacggctcagtggggttagtttatctagtccccagctatcacttgctcccgctcactcaaatggcgttaatagccaagaaaagatgatggaaagaaggctggcagcatttgatgttttgaaagcaatcaaatatgccattgatcatacatcaggtgtatctcctcagatactatttgaattttacgtcttacataagaaagtatgggaaatcaatcgtgactgtaatatgaatcataatcagttcggtgatttcaagaatgttgcattgaatcaatttgctgagtgttggatctcggcacaagacaagtattttcctgatgaagctgatcgttttgatttgcagatttatcctggtgaaactctagcagacgctggttggagagcagatcaaactacgcgaaaacgaaaaaatgggatgtaaccgggatgaaagtgggatcataccgggatttgaaaaggatttgcttgggatttaatcgggattaagttgggatcgcccgatgatgaaaaaagcagataattgttattgtcgagaaagtagataggagatctacctcgaccgatgcgacggaaattcatttttaccaattagatctattctccttgtaaattagagtgacagcattgcatactatgtggcttgcaagttacctggttcgaatccagatgctgtcatagcctcagaaatactgaggctgaatcaatcttgttgttttttattgaatttgaacccgaagattcaacaaatgcttgaagacaagataaatcatgtttcccgacgtgtcgcagtagaatacctgcctcacgtcttagctctgcgatgaccgcaagcgagcggagcattgatataaaaaaggactattgagtccgtgttctgataacaaggttttcctaacctaaccgcctgaaaaggcggccccttgatcatgttgctctgcatgcactgaaggtcggcacttcattagatcttagccagcagtgatgttggtgaactgataatcaataaatcattataaaaaatctctcaaattgtattaggtagtagtcaaactgctaccattctgggcagactcgttgtctgtccgtcgatgagtcgattattgcgagtttttccaatatagatttcctctgtcgaattaaattgaccaatggcggacagtttaggttcaattcctttactgctcatttcgtggttctgttagttaaaatcaagaacacattatgtatgaacacattcaggatcacgtattaaggtgctggttaaccccagtgctttttttcgtgtgaaaggaatcagcaatgtatcgcactaaaaaatatggtcttgtctcatgtaaggaagaaaacaaaatccttgctgaacttgaaagagatgtcgagcacaaaaagaaacacaaacataaaaaaagagggaaacaacatcatggaaaacaaagaattaattagcaagttgatcaaagaacgtgaaggatatacagaaagatcaatcaagattcaagagtttctaagatcatctgaatgtgcaaagattggtcacactcaaaagcaattattgattgatcaatctaatcaactaaacggcttagcattcattattaatatgagaattgacgacttgaaagacagcaacggcactgattaagttcagtgtcttttttattggcctgatttaggaggtgaaaccagttttgaagaaaaaagcaaagaaaaagaagtcaaaaactattccaagattgacaccaaaacaaaaagactttgctgataagttcattgaaattggtaacgccacagaagcctataaatcagcgtatgtaactgatcgaatgaaacctgaaacgatcaatacagaggcaaaacgtaccctccgattaccccccgtcaacgattatatcaacaagcgcatgaaacagatcgatgaagccaaaattccaaagcagaaagaggttttagagtttttaggtggagttatgcgtgggacattaaaaatcactgtagagactgatgatggcgttgaagagataccaccaaattggaagaatcggattgatgctgcaaaggagttactaaagagaatgccaattacagatgatccaatcacacaggctcaacttcgtaaactcaatgcagaggctaccttggctgaatcacgtactaatgaatcacaagacaagtccggtcgtatgcgtaagttaatatccaagaagtccgataagcaacttgaagaaatgattcaatctattgaaggcggtgatagcaagtgacagatacagcactactcgatgagtttaaaaagctaactgtcaatgaactaaaagatgaactggcttggcggtcatatcagaagtactttgaactcgtttacccagatatgacaatgtatccacatacgaagtacatctgttcactgcttcaaaaaatcgcagatggtgagcaacatttttatataatttcatgtccgcctcaacacggaaaatcgcttaccatcaccaaaacatttccaagctattaccttatgaagcatcccgaaaagcacgttatggttactgcttactcacaagacttatacagtcagtttgcagaatcaaatagacggcttttttctttatggtctcaaagagtaccagatgctgatcatgctttgcaagttggaaaaaacacggctcagcaatttaacattgttgatcatcgtggtggtttctatgcaacttcaatccttggtggtgccactggtatgagtgctgacttgttgattattgatgacccaatcaagaacgcagaagaagccggatcacctacgattaaagacaagatttggaatgaatggttattaacattcaagccaagacttcaaaaaggtggctcagtcatcgtaattatgaccagatggcaacaggacgacttggcaggacgcttacttgataattcaagcttcccatgggaagaaatcaaacttcctgctattgctaccggtcttggacctgatgaaacagacgtattaggcagacacaatggcgaggcactatgtcctgacttgcatagccttgatgaactacttggcaacaagcacgacatggggactcaaaagttcactgctttgtaccaacaaagtccaacagttgaaggcggtaatatcttcaaacgtgaatgggtgaagttttatgttcctgataaagaaacacaagtaagacttcacttaactgataaagacgcaaagatattgcctaaacacttggatacatcagtacaggcatgggacgcaactttcaagagcaaagccaacgatgactttgtcgctggtcaagtgtggagcaaaagtgacgctgacttatatctacgacctggctggtgtcacaagcgtttgtcattcactgagacgctagatgctattagagctatgacaaggttttacccagacgcaacaacaaagttggtcgaagatcgagccaatggtccagctatcattgatgccttgcaacacgagataccaggaatcgttgctgtttcacctggtgcagatagcaaggaagcaagagcagcatcagttagtccagtatgggaatcaggaaacatctatgtgccacatccaaagtggcgacctgaaatcgaggactggcttgaagaaatctttgcatttcctaacgcaatgcacgacgacaacgttgactcgatggtttacgcagttaagagacttcacgacaaccatagtcgtggaccagttatcagatattagaaaggaggaaacatgggactatttagcagaagaaaatcagaaccgaaaaagagaaccattgttggtgacggcatcgaccttgatccgtttaccagttatgacaatctaggctggcgagtggttaatgatgaacaagactacgatgcactgcacaatgagacaaaacacaatgctattgcaagacgtatcgttcataaaccagccgaagatgctacccgaaatggttttcgggtgattgtagaagacgatccagaacgtcagaagatgtatcaacggcttcattatgatttgaagactacacaagccttatctcagcaactcgtttatcaacgtgaaggcggtgatggttatatcactattggtgttaatgaaaatgacgatgccgattcaagtaagccacttgatccaaccacagttgaaaaagttcacttcattcatgcatttggtcaaaaccacgttgacaaggttttgtctaacgatgatccactcagtcttaactatggtaaggagcaggcaatcgtactcagaacacaaaacgccggttacaaggtcgatcctaacggtactcaaacgccaaatactccgagaaacactccaagagttattgatcaaagccggtattggcacattgcacttgataagtcgattgatgatgaaacaggtacgtcaattctgaccagatgtcaggatcaactcaaagcaatggatatcgcacttgaatcgactgggaagatgttacgtgaatttactttcaagttttacaagtctgatcagttgatggaagaaggagacgctgactttaaacgtgataagcgtgagattagccaagtacttaatacagaagcaatggcgtttggtcatagtcaagacagtattgaaaaggtagcaacaccaaccggcggtattgatttgctttacaacttcgtatggcaacagcttagtgctgcatgtggtattccaaaatctgttctaactggtgaacaagctgggacattagctggtgcatcacaagatgtcatcaactactacgacagcatcaaggcaattcagaccaacttgttaaagcctgaaattgaacagatcactcgtattttgatgtacgcaaacggtgatgaccctgatcaacttgattggaagatcgtattcaatgacttacaaaccatggacgataagacaaactcagaaatcttcatgaaccaagctaatgcttacagtagtttgatttctaacggcgttcttgcaccggacgaagtccacgacatgctagcaggtcaagacaccaaccctaacccagcaatgcagacagcaggtgacagtgttgatgctgaaactgtaaagaacattgtggataactatcaaaaagacaagaaacgagctgagaaacatgacgactcatagaagaatgcctcacactcgctatcctcgcaatcttgaagatgcttatcgaagacgcatcgttagattggtttatcagtggcgcaaagtcgctatggagtatttcaacgtctatatgggggactacttcaaaggcggtactcaaattgttggtgatgcacctaaaaagaacaatccgactgaaacagaacaacagaatgtactacataacctcgatgctatgggctacacgatcaaacaagccactagtgatgcaactattcgcaaaattgctgaacagtttgttagaacgattgatatgtttagctacaacaacgttgcaatgcagattcggatagctggtatcaacccaatacgtgatagccctgaattgaccaagatatttaacgcacgagttgctgagaacgtccaactgatcaagtacatgaaggatcgatatgcagacagcatcactggtgtcatctcacgagctatctcaaatggtgacggcaccggtgtaattacaaaagaaatcgttaaacaaactggtatgtcagtcagacatgctgcacttgttgctaatgatcaaaccggatcagcgcttgctaagttcaatgagagtcgacacaaagcggcgggcgcaaaagattacgtctggcaatcaatggaagataaccgagtacggcccaaacatcaagaactagatggcactcgtcaaacctacgacgatccaactggcggtgatgatggacagatgcctggcgaaccaatcaactgccgctgtgtggctgatccgatatttagcttttattaggaggtaagacatgacagataacaaaccacttttcggtattaactcagagaaagtaacagttgacgcaccaaaaaccacaaaagatgcgccagaagtagcagttaatcacgaaaaaactgcgttaaacgctcaatcaactccaaaaaaggaggtgaaacgagtggcaaagaatggatttgattacacaaattgcaaaaactacacagttaaggaaggtcaaaccttacttgatgttgcaaatgaagtcttagttgcctaccaacaactacgttacttcaacggcttatccaagaccaacccagttgttaaggctggtcaagtgatctacattcctgatcaagctatcaacgtaccacttggtaagtaatgattacgaggtacgactcatcaacagtcagcgctataacaaaggatccaattacaggttacattcacgccagaaacgtgcctatcgcacgagctggcgtttttaaatacctgaaaccggatggcactgttcgtcatgaagccaaactgccagaggatatcttgtctgacagcacggtggcgagtgcaaacaacaagccaatcactgacaatcatccagaaaatgaagctggtcagcgaatcctagttgataagagcaacacgaatactttgatgaaaggtcttactgcgtcgaatgcccatgtagatgaggcagacggcacagttcgagttgatttgacgattaccaaccctgatttgattaacaaggtcgataacggcaagcgtcaactcagtattggctttcaaacgcaggtcgtgcctcaaagcggtgtctacaagaatactgaatatgactcagtacaaaaagacatcactatcaaccacgttgctgttgttgatgtggcaagggaaggtccagacatttcacttgatagatcagttgtcggcgatagtgccgaaatgatcggtgagctggacgattttagtaaagagaaagggcaaaaaccacaaatggattttgaaaaggtacgcattggcgatcaaacaatcaaggtcgctaccgatgatgctgataagttgatcaagtttgactctgacaattcagcaaatcaaaagagaattgatgaacttaacgcacaaatcaagaaattaactgatgaacgtgattctttgaaaagcggcaataagcaagctgaaaacgacaggtcagaagcacaagccaaagccgatagtcttgaaaaagaattgcaaggttatcgtgacaaggttgaaggcgacggtttagacaagttggttgatcaacgtatgggcttgatcgatgatgtgaagtctatcgttggcgacagctttgatcctcacggcaagtcagaaaaggaaatgaagattgaagctatcaagagcgttgatggtgattccgctgaaattgatggcaaggatgacgtttacgttaatgcttacttcaatgcagtaaagaaccgcaaacaatcacacttcgttggtgctactgttcacgacttcaagggtgacagtgctgagagtaatgtttcagttaaccaaatgcatgaaaacttctacaaccttgcaaacaagaataagggaggtaacaagtaatggcaattcctgatggaaccatgtaccacgacggtcatctatccgccggtacagttgaaagacaatacgaagtcttaacagaagtcgctagtgccgatattccattcggcgctggcgtttctttagttaacggtcaagcagttacagctactaaggcacctatctacggcgttgcagtaaagcgtggctacttagacgttgaccacttctatgaagacgacattgaaaaagataaatggcatccaggagaagttctcggtgttcttactgatggaactatcaatgttccggttaatgaagatgtcgaccgtggagaacttgccactgttgatgctgacggttcatttaaaccgaccactgcggacgatgcagttggtcggtttttaagttcggctgataaaggctcaactgcacgtcttttagtccgcactcgttttggtggcactaccggtggcgctgacccaaccaaggacgatgcacacgcaattcaaccacctgaaacgccaaccccagcatctgaaaccaagaaaaattaggaggtaatgagttaatggctcaaatgggagttgcaactaaggaacaattaacctatatcgatcaaactatttacgatccaaagactgctccactagttgctttgcaattatttagcactatcaaagtatacccaatccaaatgtcttacagatacaaggttcgttcaactaaggcaatggcacaagcctacgcaaaccgtggcactgacattccagtagttgacgaaggtttcaaggaatatgaagttccaattactcaatcagcattagcttgtgagtactcatggatggaacttcaagaagcacaagcagctaacgtcaacttgcttgctgatcaagctgctcttgttgctcgtggtcttgctgaacgtcgtgaccgtatcattttcaacggtatggatattggtcctaacactaaaattattggcttgactgacactaatacagatgtgaccggcttccaacaattagctcttgatggtgaccacgcacttgataagttggcacaagacacagaagacggtgccttgaagatgcgtaatgtcttacgtgaagcagtccaaaagattactcacttgattggttacgcaaacgcaaagccaactttattgatgccacaagccgaaattgacttgcttgataacccagtatcaaagcttcgtcctgacatcactgttagagacatggtttctcaatactttagttcaattcaagctgttcctgaacttgaaggtcaatactggcatgcaaagaacgcttcaaaggctgacaagcaaaaagatatggctattgtctgcttaactgacgaggacattgcacaaattccagttgcaatggaaatgactcaattacaacaggaataccacgacggtgttactaagattccttatgttgaacgtcatggtggtttggcagttcgctacccatcggcattcgttcaaattactggtatcaatacaccaactgctaattagctaaaggaggggaactatgaacactgatgatccagtggtaccgatcactgcattgaagaacgcagcacctaaattaactcagagcatgtcagacgacactctcaaagagctaattcacgatgcgaccgttaacacattggcggatggtttccctcagccagttgacggtaaatggaatgacattacgcttacagcgatcaaatatctggctctgcacttggctagcatggatacttctgctggtcagggtattttggatgaaaaagttgccgtcttggaacgtaaatacgagtccaaaattggcaaagattggctccattcaagcgtttggggcctttactactaccgcttatggaagttattctgcggtggcagtaatcgatatggagtagtgcaacattgagtatcaaaatcactgatgataaaagcgattgggacgcaatcaagcacgaaatcgacatattaaatcgctacatggtcgtaattggtttttggggtaacgatcgattgatcgaaattgtatctgcattggaatatggcgctgatatcaagccacacaagccggatggctggttaatcataccaagtaaaaatgatgaacttggtgaggatggcttacctatgagcagtagtgaatgggacgaaaaacatcctgatcagcaactgttccgaccaggtggcaagaaaggtgctcatgtcctagcggtcaaagatgcaagcagtgatacaggcttcaagatcatcttttatttgatgaaagaagtcaaaattccttcaagaccgtttcttcgtaagacttcgattgaatatgaacaaaagtacattcgattgacacaggtcggagtccagcgagtgtttgaaggtcgtgctacaggaaaaggcttacttgacaagctaggtgctgtcgctgttgctgacattcagcatgagatgcgcaggctgtataagccaggcaacgcaccaatgactatcgataacaaaggtttcaataatccattgatcggtaaacatgctggcggtcaaggtggggcactcattaacaaaatcacttataagatcattccgaaataggaggacactatgagtttttacatggatgtagcttcgatgttggacgattacggcgttgatatcgaagttcggaaatcagacaaaccacacacaggcaaaaaagagcttgtgggtggttttttaatgtctgacgatcaatctaccttaatcgatgaaaaaacagcagagaaacgacatgagccggttattccggttaatcagttgacatcacaactcattcaatatttaaccggcggtactcaaaccaatgcagacctaatgtggctgtcatctgggaagtactacgttcacacaatggtcaatgtcccatcacagggtggtttatttgaagtcactaactcttctaactatcaggactattcaaacctgatcatttacgaattgaagggagatgacgcacaccaacatggaaattcaactcaaagataatcttctgctgacttatatcattcagcaactggttaaagagcgtcttgattgcgatctgctctatcagaatttagtttctgaccgtccacaatatccttttgtcacttattcgtttattgtgccggaacaggaaacaacaggcgattggttgggcatgggacgacagtacatctcacacctacaaattgattgccatgctgacagcgccattcaagcgatgaatatggcaaacgacctttacagtgcatttcaaagcagtgtttatcgtaactactttgagcaagcggatattgacccacagaattttacgaacacaagcgacagaacagtcagagttggtacctattacgactataggttcggctttgattgttcttttttagtgtccaatggcggtcatgtttactcaccggatgacctccacttccaagctcagccggaaacagaaatcaatacagtacaactcagcgacgctggtgacagtgaagttatcagcgccaatggaaaagaaaaggagcaatagcaaatggcagaaaccattacagacgttcgtccttttacgagagttaaggacgttgacgtagaaatgactgttgtcaagccacctgcaattatcgggcttggcaatcttcttattttgcatgaagttgacgcaggctcatcttctacagcaccaaagcctgctcttgctgatactggcaccggcaaggatacgccagctaagagcgatacaggcaagactactggcacaactgatggcaaggctactgatgatggcagcaagaccatcaatgtaccaaagatcacaccagttgcgccagtaactggtgtacctgacaaattggaacccaacgacgtattgaacggcgtattaagccgcaagactgatccttataccggtgctcaatacgttgaatacgcaacagcagacgcagttggcgcttactacgacaagactgatccaatttacatcaagtcagacaactacttcatgcaagaagcagcatctgaccgtattgccgtattgaattatccaaagggcaagcttgctgacgctttgaaggcattctggtattacaactgggccttcatgatctttgataagtcacaattcacagacaccaccccaagtgatgacgcaattattgcatctaacatctgcgaagctaacaaggatcacttcttagtattgcaagctactcaaccagccgcatacgtaaccttctatgcacaaaactacaccatcggcttgattcacgacttatcagaaccaatggatgcagctctcatcggtgcaaccgccaccttgacagttggcttagttacctggaagttcagaaagcttaagggcattactgctgaccaaatcactgttcaagaaaagtcagctatcgaccgtgttcacgctattgcttacatcgaagtaagcggacaaggcgaaacatcagaaggctgggtattgtctggtgattacatcgactcactccacggcgatctttgggtaaaaaccaatatgggcgacaagatccaaaagtacttgcaaaacaccgacaaggttccatatgaccaacgaggcattaatgcactcgccgccatttgtagccaagtcctccaacaagcctacgaacaaggaattgttttggaacaagaagtatacgactcaaacaccggtgaaactcaatcaactggcaagggggattactcagtaaccgccactccacgttcagctcaaagtcaaaaagacttatcagctcgtcactacggtggtttgagtttcagataccaccgttcaggtgctatccacaccgttctcgtacacggcactgttcaatctgatactttcactaattcaaaagcttaaaggaggagtaacacatggcaagttttaactcagccgaaaccggcttgatggcaaaatacaacgccaatgacaccactttaatggttgacggtgaattgatgtatggttttgcgacagataccatgatttccgttgcctacgacaacgacaatgttactgtcgcacaagacccacaaggcaccgctgttgcctcaatcaacaacaaaaccggtgccacattgactgtcaacttgaacgaaacttcaccaagcaacgccaagttgactgaattggctaacacacgtgcagaatttccactcgatttgagaacttcaacagttcaccaaaccgccacacactgctacatctcaaagatgccagacaacaccgcagcacaaaacgccggtaatcgtgcatggcaaattcacgcacttaaccttgatactgaatccttagtcggtcgttagtatcgagaatggctttcacgcttacaaaacagaaattaaaaattaaaggagaaaaactatgagcgaagaaattcaaaaccaaaacgtaaataacaaccaatcaaacgaagataaggctagccaaatggctactgaaagtaagaacttgcaagacatgatggctttgattgataagcaagaaaagtctagtgaaattgcttcacttactggtaagcctactttcttaactatcaataagggcaagaagaatgaatacactatcgaagtaatttttccaggtgtagcaaaagcttcaagcttacgtgatgacgcaagaactgctcttggtgccattgatcaaacctacttcatgaagaacgttgctattaaggaattgattgtacgtccaaagatttactctctcgattggtttgacaagcgtggaggctatgacgatgcttacaacaagattttagattggtttcaatcaagcattaatggggaaggctacaccgaagaagattagtgatttggcttctgatcctgcaacgtggttaccacagtgtttggtaatgcacggtgttcccgaatcatggatcaatcatgcaacgctcgaccaattaagagtgatgtgggaagtagtcaaaaaagacttgaaatatcagacatatttaaccgctaaagatcaagcacgaattatggcaaaaggcattgcgttggcatttggcggtgaggacagttaaagcctaataaggctttcttattttgcacaagaaaggatgagatagatggcaggacgacatgttggtattgatatcggcgttagagttgataattcagtattcgattcagttgatagacgtattgataaagttaaagctaatgcagaacaacttaatcgggtgttgtcacgtaccaagatgccagattctgccgctaatggcttagacaagcttaatcgtgcatcaggtgaaactaaaacacagattgacaggttagctaatagttataagcaagttggcactaataacaatctcaatcgtgcgcaaagtgatctgtctggtattgctgataaggctaagaaagctactgaatcaactgaccaattaaagcagtcaatgaaccgtgctcatgaatcatcaaaagcacttggtgatatgggtagcggttttgatcgtgctagaggatcatctgacagagctagagaaagctttgataagactaccggttcatcaaataagttaaagagtggctgggaccgcttgaaaggtgctggatcagcattggttcaagtcggttcatctattgctactgcgatggttccagttgccgctgcattcatgaaggccaatggcgaagcaaccaagttggctgatgaatacaacgttatcaagaacttgcaggaaaccggtggtgattctccgagagcagctagaagaaatactcgtgaaattcaggctgaaaaccggcgtttgtctcttcgttatggtgttgatcaaaacgaattggctagaggctctgagcaactgctcagacgtggttattccggtcaacaagacttagctgctcacaagtactttttgcaagccgctcgtgctactaacgaagattacaactcaatcgttaactcagctgcacctatgctggaacagtttggctataagtccagagctggtaatagtgtaagacgtatgtctaagtacacaagagatgttttgaacaaagccgcttacgttgctgacttaacttccggtgacgttggtggtgaaagtggttttggcgagtccttcaagatgatgggtagtgccgctcattcaaatggtcaaactatcgatactatgctgggtgcattgggtacgttatctaactacggcgaagaaggttcgagtgctggtactggtatgcgtcagatcatcactagattgatcaaagcgccacatagtactgcgatgctaggtgccttgcatgatttgggtattaatcctaatagcttgtacaccagaaatggtcacttgaaacagttaggaaccatctttgagatgctgaatcgtgcgtctcgtggtaagaaatctaatcgagtatcatccgacctgcaaactttatttggtcaaacaggtttcaatgatgctcagattttgatgaatcactacggtgacatgcaacacaatgtccgagaatctcaaaatgctgcacgtactggctatatttcaaggctgtcaagaaagaacatgtcctcattgcagaaccagttagctagaactaagcaacttgctactgatatgggtatgagctttgcaaaggaagtcgcacctggtatcagcaaggctcttggctatgctaacaagctacttgaagctatgcgaggtatgccaaagccagttaagactgctgctgcttatataacaggtattcttggcacattgggtgcgtccaagttagccagtggtttcttaaaagctaatttcggtatcggtaacggtaaaggaattggcgctggtataggtagactactgtttggcaaagagaccggtgtacgtccacgagacccggttacaggtcaatacatcaaaggatcatctcgccagggtggcttaatcaatgcactgaaaggtaattcattcggtggcatgttcaagctcggcagagtccagcctggtgagctaacaggtaaagcactagttggcagacgattgcttggcggtgctgttggtgtcggaactgcattagatgttggctatcaaggcttccaagcttacaaagatcgacacaatgcagcaaagagatcagtagacattggtggcgctgtcggtacaggtgctggtgccatcattggtggcattttcggtggtcctattggtgctgcacttggcgcacaagctggtaaactctttggtcgaattggtggtagtgctgttaacagctttgtacatggctggcaacgcaaaaagccaccaaagaatttctggtcgcttgaaaaccttggctggtctactaaagacacattcagtaagattggtagatggggtggtcaagttggtaagtctatgggcagagcacttggcaaggctggttcattcgtcaaaaagaatggcaagcaattagccttaactgctattgctccgtgggctggtattcctgcacttttatacaagaacaaccctaaattcagaaaatgggctaatagcgttggcaagactatccaaaatggcttcaaaggagccgttaagtgggtaaaagacctaccaggcaacatccataaaggttggaatcgtgctgtcgaggctagccacaagttcttcaaagatttacctaaaaacttagataaaaccaagaagagtgttggcaaatgggctagtcaaacaggcaagaatatctcaagggcatggcaacgtggcaagaaagctactgttaactttgtcaaaggcattccaggtaacttagctaaaggtgccaagagtgtagcaaattgggatagtcgtaccggtcgcaatattcaaaagacttggaacaaaggtgtcactggcgtaaagaagtttgtcggtggcattcctggtcagttaaacagagcacacaagagtgtaagcaactggtctggcaaggttggcaacagtatccaaagcggttggaataaaggcaaaaaggcagttggttcttttgtttcttcaattccaggtcaattaggtaaagcctataaagcagtcaaagattgggctggcaaagtcggcaatacaataaaagatgcttggaacaatttctggggtaaagctggcgatatccgtaaaggtatcactaataacctgaaaggttttggtaatgacttaaaccgtgcggctggtggttctggtaaagccttcaagtatgagaagatcaaatctcatgcaactggtggcttaatcggatcagctcatagagccttagttggtgaagccggtcctgaattagcctacagagccggatcaaacgcacgtcttttaggtgctaatggtcctgccatcactaaggtgcgtccaggtgaacacattcttaatgcaagagacactcgcaaagtcatggctggtggtttaggtcgtggcttaactctcaaaggttatgccactggtaacactaagcttggtcaaaccaccaagacagtatccaaggattacaagaagatcactgatgacgctactaagtctttgaagagtttaagcaagaacaatgcttcaagctggtcaaagattaacagtcaaactgctaagtacaacagcaaaaacagagctaatgctactaaggaatacacaggcatgcgtaaatctgtggataagcagatgaataacatgcacgatggtgttatttctactgctaactcaactagcaaaggttttggcaaggctatgggcaagatgcgctcatacgctaaggacgcaatgggtgacaccattgatcaacttaaccgtggtattaaaggcatcgacaaggtattgagtcaatttggcggtaacggtagcgtcatcaagacggttcactttgcacaagggtctgacgctaacggtcgcttgacgcaaaatactctttcagttgtcaatgatgcgactagcggtccacgtcaagaggctcttgtctcaccaagcaacgaattgtacttccctcatggtgacaacgttcatttgatgattcctcgtggctggggtgtcttgaacggcactcagacgcaagaagtcgctagaaaacgtggcattcagcactttgccaaaggtagtggcgtaagtcatagccaattaagaaagattgcatcacatgcgcttgctgatcctgctaagagctttgcagatatgttcaccaagaacatcaaggaaagcggaccagttctgcaaaaaggaacggtcgatcttggcaagaatgcgtcaactcactttggtaatccttggagtactgctatgtggattgtcatcaacaatgcgattggtgactccactggcaagggtggtactcgtgagcagtttttaaaatatgctgaatcaacattcagtggcgttaagtaccaaatgggtgcggcaagcaagacactatctgactgttcgggtatggtaatgcaagctttacgtcactttggcgtagatattggacgtaccaccgtggcaatgcaacacagttcaggtgttgagtacttgggtaagtcattatctaaaacaattccaggcgacttggttatctttggccatggaacaggtgccgctggtcacgtgggaattattaagaacccacacaccggaacaatgttcaacgaaacgccaccccatgcacgcgttacctcaattgctgatgacaaaggcatgggatacggatattaccgtgttcgtggcttgcataatgccgctcaatctaagaagacagcagcggctgataagaacttaatggctcttgcaaagaaagagctaggcagtaccgccttgagttggattaaaaagaatcttagcgatgatcttggctcacttggttcatttagtatcggcggcgacttagccgaaagggctaaagccctagccggcggattaaagaagcttgatcctaaagcaaccaagaacggtattgcggctgttctgggtaattggaattttgagtcaggtggtttaaaccctggtgcagttaacagcagcggtggtgcttccggtttaggtcaatggcttggcggtcgtaagtctaacttaatcgcttatgctagacgtcacggtacaagctggaaaaacgccggcacacaattaagctttgccgttaaaggcgaaggctcagacagtgctattcttcgctccgttttggaaggaactggtagcgttgccagcctagcaaacaagttttcgtctgaatgggaacgtggcggctacaatgctcagcacgtcaaaggtgccatggagatccgcaaagttcttggatatgctaaaggcggcgatcctgtcgttggcaataaggttctagttggcgaacatgggccagaattagctgaattcaaagatccggttcacatctactcaaatgaaaagacgcggcaaagattaaagccactaacttcatctaagccgaaagtacgcccagtaagaggaactggcggggctttaggtgacattcaagtaaccgtgaatattaacggtgacgttgatggtgacaatgctaaattgcaaaaattagcaaaaatgattggcgctgaggtagatcaacaagtacgtcaaaaattaaatatcattcttgatcatattggcgatgatacgggtgacgatgatgatttcttatagaaatgaaggtgatgttagtggttcaagcaactaagccaaaaaagagaacagctgaacaaaaagcccatgactctatgaaatactgggacaagcggcaaaaacatgaaagcgccgtttaccgaaaaatgttttcaaaggcgcagggctatgacttcgattcacattttgaaaagaatcaaattaaaaagaaaaagcttatccgaaaacgtgataattgtttgaagcttgttgatgctgcaaacaaaaggaaaaagcaagcggaaaacaattataaaaaagcgaaagacaagtacgaccgtattgttacgcaaagaatcgatttaagtaacaaattggcggaaattgcggaacacaacaccggctggaagaatgaaggtaaatgtgctatttaccgttcggatggcaaaggtgaaattatttatatttcgccggcagacggtgaaagtgaaaatgtttcttcaaacattacttcttatccggttgatgagggcgcaccatatagctcatatgctcgtgtaaatagtaaaggcgcaacagttgcaggcatcattgttggcaaagataaagccgattcataccgtaaatggcacatgcttagtcaatggaatagttcgcatgttcggttaacctatcgaggggacttctgctataagcattacttaatcgcaaatatgaacaacgactataagaatcttcgagataacattgaagtttcacttacttttcaatttgtctatcaagcaaaaatcaccacttcaaatgatagtaagcaccacagaaagtcgtctaaggcttctaaatctgtcgcaggtaatcgaaataaaaagtacactgctatcactattaaatctggcgataccttgtgggctttgtctaagaaatacggcagttctgttcaatggatggcacgagtcaaccacattaagaatcctaacttaatctaccctggcaataaaatacgggttgcgtaggcggtgatttagatgagaaattatcttgatgttgatgttaaaaatattccttatatctttcaaataacccttgtgggcgatacctatgatatgagagtagattacaacgaagttgcggattactacacaattacaatttggcataacaataagaggcttctaacgcaggagcctcttttgcttggtcaattagttggtattgatatccctgatcccgaattgccaagaattgacattcgcacgatggacgaaacgggtaaggcaacagaccaaggcaagggaacatttggatatgaggtccgcttgtatcttgacgttgttgacccgaatggatcagaaacagaagacccatcaattaaaccgctaggttatgaccctaacgaaaatgatgacgacctaacggatgaggaagtgtcttactaatgatcgttactaaagatccacatatggaatttgtggcggttgatagtaaaggacacaagcaaatcgtatataacgatgaaacttacgaacataattatccttttacgtttgaagtcccgtttactaatgatcctgtcccgtctacttttacaacaactattttcaatttaaccaagcaacataaagacttttataaaaaagggatgcactgctggataaattttaactggggtaaagaccctaaaaaaatagctgaaggatttatctctaatacgggtaaattaagcaatgatgggacaactgatagtaaagttttaacttttactgaaggcacaaactacagcaatgtagctgctcgaaagctaaagctaaaaaagaataaaaaggttaatcactacaaaaccgttaaaatcactgaaaaaggtcattacaagaatcagcgttatagtacctcggtcgttgaaacttacaagagaggtcctaaaaaagggcagaaacatatagtccaccattgggcttatcgaaaagtatgggttaaaccaaaaactacaaataaaagggttaaaagccgtgataataagacttattttgctaaccgagtttaccgaaaaggaacgacttataagcaagtaattgaaggaatagcggaacaagccggtatcaaaatagctaaaatcgatttagctaaaaatgaaggaattaaaaaatcctttaccgctaaaggcaagccgctaactttaattaaaaactttgttaagttagcaaaatcggaaatgttttatgaacgtggcaagctcgtaattgtcaatcctaatagcaagaaaaatacttggtttgtgattgatgataaagacttaattcaagttccatcgcaaaacgatgatgataaaaacgggacaacttggcaaattgttacgcccttagtcccagaagttaccgttaataccggcattatcatgaattctaagttcttaaaaggaaaatttgtcgttaaaaatggacagcatagttttgatggcgaaagtccacaaactcaatgcactattgcggcggttacaaaagctaaggctggtcataaaacaaaatctaaaagtaaaggcaagaaaaaaagtaaatctaaaaaataaggagatgacagtatgaaacaaaaaaatagggttccaattcgatggtatgaaaacattagtaaggtgaaaaaccgattcagcagaagtcttgaatctgcttttttagctaaagttttaacttacgacaagaaaaaacacattgcagatattcaaccgctggcgaattggatcgatggcactaaatcggctcagtacttagatgttccggttgccgaatcttgctataggcttgatgaattgttagataagtttaagtcggatttaaaagccgttgatagtagcccagaagttaactcacattttttagaacattatccgaaaaagaagtctatgagagttggcgctgtagtgatagccgttactatggaccgtgacattgataactgggacggcactgggaacacctttacgccaaataccggcaggatgcatgatgcaaacgactcaattatcgtttctgtttataagggtgacgacgatggctagggacctatttatgagtgataatcatgacctagttattgatccgattactcacgatttagaaatgactagcggtcttgacgaaatagcgcaaagaattaaggcaacgctagaaattcgatatggcgaaatgcaacggctagaccctgaaatgggcgcggattatagcagctttttaggtaaaaacttcaataagcaagcggcggagaatgatatgcgagcggctattgaagcaaacgtaccggaagttgaaaccgttgataatatcgaatttatcaagaaacctgaaagaaaaatgcagattaattttagagccaccgcaaatattggtgaagtagaagggggggttacaagttgacaactgattttggtttaaaagaaaccggttatattgccccaagttttgcggaaatcttagacggtgttgaagacgattaccgaactagattaggggatgatattgcactaacaagtaatgcttatctaggaatttttgcccgtttaatgagtgatgcgtcttatgatttaattcagcaacaggaacaaatttactattctggattctattcaaccgctgtaaattcagcattagaccgattagcgggcaatatcagtttgacccgtaaagttgacgctccatctcatgcggaagtagtaataacgactgaaggcgaatatttaattcaagctggcgaaaagttcgaaacagaagacggcttggtatttgacttaacagaagacgttatcacttcaaaacaaagcgacggggcttttcaaggaactggaaatgttgaatgtgaagaaactggtgaatttactaatgtaccagccaacacaattactttgtttgccaacccagatgaagattttatttccgtaaccaatccacgatctgcaggcggtgggcaagattatgaagacgatgaaacctttagaaaacgtttaattatggaaaatgccgcccgtcctggtcctacagaaccaggtattaaatcggcgttaatgaatttaaacggtgttaagcaagttggcttcgttgacaacgacaagtataagacggatgaatacggtaatcccgaatgttcagttcacatttatgttttaggcggtaacgatgatgaaattgctaaaaccttaattgataaatgcgcggctggtatcactttagcgggttcaattgttaaagaagctccggacgctacgggaaaattaaaagaagtcaaatttgaccacgctcaacaacataacatttatgtaaaggtcgatgtatcaattaatgacgactggaacagtgatgcgggggttgacgacattaagcaagcaatttgcgatgaaatcaactcacttgaaatgggtcaaagagttaattttacccgcctttattccgttacttatgatgtcaacggcgttgatgatgcaacaattgcaatcggtagcacaaaagataagttagcggaccaaaatatttctattggtcgttcagaatttgctcattgtgaccctggagatgtggaggttgatttaattggcttatgagacaacagaccaactgatcgcggaagtagccgaccactggaataagaaaaaagataccgttttttatcaattgttagacagttacaattcactgcttgaaaaaatcagtgatgaaaatgaaaaaattgcggagtggcgtagcattgacaaagcaaaaggcacaacccttgatttaatcgggcaagattacaaagcttatagaattagtgatgatgatgaaactttccgttttatcatttttttacacattttaatctctagggcacagggaacaattccctcaatggttaaaattctgggcactgccttaaatgcaaagcctgaacaattcaaggtctataaaaccggtcttcgacatgttggtatcgaaataccgtgggacaatgtgcaaacacttcaaatgcaaaaattcatcataaagaatattcaaaacctgctcgcaatgggttactggattgatgagattgttttttatgtaaatgttacaactaccgagtacattggtgccgcttcaattgatgaaacggatttaaacattgatgttggttccagctggtggactggctgggaagagtcgcaacagaacacagaatatattgctaccgctgtaacagcggaagacgtaaatatgcatcaggtaacaactacgtggtggacaggttggcaagaccaacaaccatgtgaatcttacattggtgcaaaaccattggttatcgtttcttacaaaatgatagctaattagaaaggaaactatggatacaacgactagtaaaaaaatgaatcaggcgctagttacagatatagggcgtaatttgttttcaaaactcggatcgggtaaaggcgaaatcctttataccaaagccgcactttatacgcaagatttaagcggaatgaccgatgaacaaattagggctttgacctctttagctggcgaaaagatgacaaccggcattaaggtggctgacatctcaccggttgataaagaaactaaacaagtagacatcgaatttgcattttcaaatcacgatttaaatgaggatatcaattttaagtcgattgggctttacgcaaccattgatggcggcaaagaagaaattttagtcgcaattattccagctattggtactgcaacacttggagcaggttcgccagatcacacatcaacacagctaatcaagcttggcgttgcgtttaaactcggcgcagctgccaaaattaacatcagtgtaaagcaaattggcgtagtttatgatgaagatttagacgcagctattttgaagctcaaagcggagtatgacccgaaaattgagcaagctggcaaggtcaaaggtgcaaagatcaacgacggagcggttgttgaacccgacaaggatggcattcttgacttgatcgttgatagtgaccgcattaaggattttccggcagatttaaaagacctcaatgacctgccaagcgggacatatcggacttcccaaagtgctgctagctttgtcaattaccctaaaatgcaagatggaactactccttttaatatcccaatagtctggaaaaacgcattaatcaaagtagtcaaggatgctaatgctggataccagcttatagtgtccagccaacaaaaatatgcaatccgctattttagtaataatcattggggatattggtttcagcttccgacattatctaataatgacatcatcaaattaattgactccaaggttgacggactaaacatcggcaattacgccactaagacggacttaactagtgtttctaactcagcagtcaaaaaggttaatggcttaacccctgacggaagcggcaacgtaaacgttacctcaaccgttgcccgcggctttgatgctaacgcaaacgctacaactaagatgacggaagaaaacctgcacggcggcaatcagatcttgatggaccagaatgcaggtcaagacatcgttaactgggcaaaaggtcaatttaacacactgaacgggaatatcaataagctcaacgctaaaactgaaattcccggtgttgccaatgcaaatgatttagttggtgacgcttcttcaatcagtacttacaaattaagtaactctggcaatcttaatgtgccggatttctacccagataagcgtggcacgctaatcaacattaattatgatggaaacgctaaaactcaaatttggattccagtaggtaattcaggtggcgactcaattgctttgaggtactgggaaggcaataactatcctaaatggaaaaaacttgcaaccgttcaggatacaaccaacttgcaaaaccagatcaacgacttgaaaaagtcaaatgctgatttgatcggcactgttaactggttgaaggataatgccgcaattgctagaagattcccagctagtcaagaagcgcaagctcaacaatgggaaaatgatcatccaaactactttgcattgatcgaaaaaatagatagaaagaaggtgaaaacatgctagatcacatgatttttaacaaattaaaatggtgggactccacgaaccgcctactgatcggtaaaagaatcactgcgtcgcttgatacttaccacacagttaaagctggatttaactttactgctgcggattatggcaatgtgccggctaaaaccaaagtagaaaatgccttaattgtagcggcttataaatttaatggctcggctggtaacgcaccaagtggcacgtatattttgactgatcaggacaacgccaagtggctaagacttgacggaaccgaaaacattttcgggggggtaattagtcccctaagtcaagcatttagagctatcactagaaaggtggtggctctatgattgaaaagatgatcttcaataaaaatgattatcttatgttccctaaaaaggtcaaagttcccaaagacactcaaataagtaccatttttacgaattttccaaatcctactcactcttcactgaacgcagatttggagctggatgtatgtgcctcttcaaatatcgcttatttagtcgggagaggtagaaatttgccaattatcagtgagggagatagtagcaccgtctatggtcctgtatgggttcgaaaatcggactgtacggaaatcttcgggggggggtaattagcccgttaatccacctataccaagtacttagagccgccaccagaaaggcggtggctgtatgctagatcacatgaagtttaaccaagaaaattattatccaattagtagcagtgatgtaacagtcaatgctaatggcaagacttatcgtgaatacaaatatcagacaattactaaaactttatcaggtaatgatttaaaagctatatctaaccacactaatgatttctttgtagctgatatttctgccttagatatgaatcgaaaaactagatttacttttagtaacggtgatagctttattattactaattatttgatgtataccaccgctggaaggagtagttatttggataatgcgactaaaaataattatcaaatccaattctatccatggaaaaatgtaattgaagcatattaccataatggcactgacgatgtaagtcaactggactgggtaaaaatagaaataaacgtagattagcactcaaacgagtgctttttttatgcaaaaaataaccttgctcacggggcgttcccgtgggcttttttaatagaaaggagccaataaaatggctgatgaaaacacacaagttgcaccagtagcgggcgcagaagaaaacgctacacaagatcaaaacagcgttgctgaacaagaacaggcattaaaggcaaagttcccaactcttacaggctttgtctacttgtcagatcctgacaatgcggatcccgtttggcatcacaaagtaatcccagtttttggcgatgaagcaaatgtggggctaccatggcaagtccatgctgaaagaccagctgacaacttaaaagacccagtttggacagttggcgctactgattggagtgaaaacgataagaacaaccaacgcattatcttgcaacaagctacacaaaagctggctgaattggacaagaagagcgtagaacttgaccaagctaacgacaaggtagaccaagcattgaaggatatgcaagaagttcaagctcaatcatctaggcaaaacttagctttgatgaagagctttactgaacaaactcaaaacactaatcaaattcttggtgctatgcaaaagaccttagcaatggtaaccaaggcagttggcgcaaatgctaataacgctacaccagctaacccaacaactgatactaagccagcggatcaagcaaccgataagcaatagttaaggaggacataaatcatgactttaatggaacaaattcaagcaaactttttagagatgtatcgtatggactgggaattcggcatctatgacaagaacggtatgaaggacctagtagtacaaggtttcttatcagctgaaaattaccaaaagattgtaggcgaagcttatgtgccagctactgcaacgcctcaacaataactcactttacgtgatcattagtctgctgattttcggtaaaggcttgggcttttaccttaaccgcagatttttcttttatccaccacaactagcgtggatgatgaacaacgtttacttagactgttcaatgatgattgtgggcgttgtgttgctggtttacacctgttcaaggtacaacaacaataaaattctaggggtgttgttggcacttgtcgtggtgctgctagcaataatttcatcaatcgaaattgaacacgtgatttttgcccataaaatagagtttgtccagaacgctttgtcaaatacggcgattatagcttttatcatctggacagcaaggcattattcgaagcgttaggtgatatagtgcatgtcgacctaaacagcattatatcggctttatccgctttgcttttaggctactttacttttaagcaaaacggtaaaaaaagtgacatggatagcgtggagaataaccgagattacattgttgaacagaataagcgtttaaacgcggaaaacaaaaaactactcagtgaaaatgaaagattacgaaaggagttacacaattatgaagccaaacactagaattttagattacgttaccttggtgcaagatggcgttttgaccgttgacgatgcaccacaggacatcaaagcggaagtgaccaagtgggttcgctactttgcaggcattaaagacgattcaatggtaaaggatcctgaaagcactacaccagcaccacaaccagaaaagaagcaagatgctactgcttttttagctaagaaggtgactgactaatgaatttaagccaacttaatgaatatctttttgtaggatttcttgtctttgttgctatctgtcaaggcgtttctaccggtattgatttctttgcttctaagtcaaagaagcctttaccaaaggaagtcatgaccattgaccagattgcgaagttcgtagtaagtgaagccgcaacattagacatttcaggtgctgaaaagaaagctaaggcggttgaagctttgctgaaccaagcacaaaaggaaaacaagccccttaccgaatccgtagctaagggagctgtccaacacgcatatgaccaaatgcaagctgatcaagaaaaggctacacaagatgaagatgacaatgctcaaccaatcggatttgtaagcggtgatgattctgatgcaaaagactaagacttacaacgaatttgtatttgaatcttttggaaaatcgtttgaaaaccgaaggatagccaaaagaaaccgaatgaaaggcggtgaaaaagatgtcaaacttaaccgtatcaaaaagaagtttgggtgctgatgtcgcaagctaccaatcagaaaacgtaagctatgctggcattaaatttgcattgattaagcttacacagggcactggctatatcaacccaaaggcaaaagctcaaatcaagagttcacttgctcacgatcttttaaccggcggctatttttatgctacacactctaactctgtatcaaaagcaagggcggaagctaaatacgccgttgaaaaggcgaaagcctacggcatccctcttggttcataccttgcggacgactgggaacagggcagtggcaacgatgtcaacggctctgtcggttcaaacactgatgctgtcatagcagctatgcaagtgatcaaggaagcagggtataagccacttgtctatgctggcgcttatgtattgcgtaatcgccttaacacggctcggattattaaatcgttcgggacttgtttgtgggtagcttcgtacaaggtcatgggtcgtcaagattcacctgactttaattatttcccatcaatggacggcgtagcaatctggcagtttaccgataactataaaggttacaacgttgacggtaacatttccttgattgatttaaaggctagttcaggtagttctcaatcgaaatcaactaagacgaccgtagaatcgctctctcagcatcccgttgtaaagtggaatatcggtgctgttgcagtagtatctaattcaaagggtgcttatgtctataccagttccaaacttgataagcgagaaagcgacaagctaaaaccacaaggatcaatgtggcaggtgttcggcttggaaaacggtgccgtcaaagttggcaagaaccaatacttcgatggtcgtgccgtctatgtcaagactaacccgatcgcatacaacgatgccaaacatggcgttgccaagatcgtgatgccacatactcacgccttagatgcaccaaaggcagacgctgggaaagtctacggcttggaacttaactcaaaagttgagattcaagggcgtgtcggcagattcctacgtatcaaagaaaagcacaatggcaagaccgtctacgtcacaggcaatcgtgcctacatcgtgctatagtaataatgattgaaatataaaaaggagtgtgaagaacactccaaatgccgcaagagccgctctgggagatttttcctggagcggctcttttttgtgttatggtataataaaaagagtagtggtattatccgcttgctctcctggttttacttcatgaactttttaataatccatgaagcaattacagtggctaaaatacttgaaaaagtagtagccataaaagctgttatggacatgaaagtaacactttctagactgtgataatttggaattggtggggttccacacagccatatatattttagcaaattttaaaatgagaacaaaatattggaacaatgttcatttttaatatataatagtggtggacatgaaaggatacactttcgtttaaagccccaaagctggttactttgggcatgtgtctagccgtctagtcggtgcttggctcttgctgatctgctgtcacaagagctttttttatgttcaaaataaatatattttagttaattttatttttttattgcatttatcccgatatcgtgatattataataagtgaaaggaggtaaagatatgtcaaagaaaaaaggcaaaaagaaaaagcccactcgtgatgagacttccgaaaagatcgctaagtatgcgatgatcggagcttggagctatccagcctacgaacttatcaaacaactagggcgaatagttctaacacttgtcaaacacaagtaagctttaaagagggaatccgagaggctcctctctttgacatatctaattataccatgacacacaaacaaaaaatgcatcgttatttagcttggagtgtagttgctattctattaggattactaattaaaatgataggaagtgcattctagtgattaacttaaatagtccagatattatggaagcaaaagaagcagcaagaatctggggcgtatcagagagctatgttagaaagaccattagtcagtcacctcaaaagtttccagaaggaacagtgcgtaagtttggaaagcaatgggttgttaccactgagggtatggaacatgctactggtaaaaaagatcctagaaaagtgttataatcaaattgcctattgaaatataaaagaagaggggtgaaatactcctctaaatctatcaagaaagccaccttgggagaaatcccagggtggcttttttattttactcatgatataatttttaacatctcttctgagataacatcaaattttgaaccttttgatttatattgatgtttgctccacggttaatttcgtggggctttttttcttgtggtataatatatttatattactgcacgactattcattgcgaatacagaaaaagggaggaaccgagttggttcttcccatttctgtttttacgtaatttgcggaaaatttacggaaaaaagcttattactatttttgatttatgatgattcaacaaataaaaaatgcgtgcttactgtctatgatgacctatgattatagtatcttaatttggtatgattattgctttgattgagtattgcatgaatcctaaaaactttagagataaaaaagcccatccagaatatattacttttgtaaatatcgctgatttagttaatcagttaggacagatagattatactaatccatcagatccatatactcaacacaacgttttaagtgaatactttaagcatttggaacagggatctattgctaaaaaagaattcggttccacaaatttctcaggtgataaggcaagaggctcgattttttcaactgttgtacagaaactagatattttcactttaccgaaaaactcacgcatgaccagtatgaacacactagaaatgaaatcaattggttttccaaaatatttggagtttcaattgcttgatcaacgactatatggtgagttaattaaaatcaattttagagataatcataataaaaaactgaaaacgaatgagattcgtgttagtcaaaaaggatttgttgaaaacaactttgatgtcaatctaaaaacaggaagctttgttgaaattgaagctattacaggacataagcgtttgaagaatacttttaagttaaagattaatcctaaagttaaaaaggttgaagtaagtcaggtaggaaaacctgaaattaagatggaaaactttaagatgcattatagtgataagccaattgcagtctttatgaaaattccagattcagatgcttcaaacaacttgctagctacaatttttgttaatcaattatatacagaattatcacgtcagtgtcggctggttcaaggtggaagtacaattagacgagtacaatgtatttttgatgagtttggtagtatgattccgctgcagaatatggatcggattatgacagtttcagcaggtcgtaatattctatttactttagttatccagtcttatgcccagctctacagtaagtatggcaaagaagacggacaagttattaaagaaaattgtcagaataaatgtttgattatgtctactgattcagctactaacaaagaattttcagaagcttgtggcaataaaacgattgagacaagcaatatttctaaagatcaaaatggtttagccaaaaatgttagtgttagcgtagataaagtgccgttgatactaccagaacgattagaacatttagctggcggtgaaagactagttttgagacctttaacaagaatgaataaatggggctgggcggtagtttcacatcctatttttaacacaggaaaaacattaatgccgtttgcacatacattcttaactgatgactttaatcctaaaactaatccagatttagttgaaaagattgatgcacatgccaatattaatttaaaagcattagaaatcgattggagcaaatggttaacttggactgaacaagttaccaaacaagatgaagatggaaatgtatttgtagaagaagaaaatttggctttgcaggcatataaccaatatcgtcaaagtgacgcaaatgttcaagcagctgctaaagatgctaaggaagaacaagaaatgaagaagtctttaaaggaagaagaaaatcagattccaccatttatcacgaactggttaacggaacatgatggtgatattagtgatggaacaaaacaagcaatattgaacgaggctacaaaattaaaagatgtgcctgaaggacaaaaaccaagttcaatagcttttgttaatatcatctataaagataaaaaattagaagataagaacaaggaaaagaatgagttaacacaggaatttagccaaagctttaatgaatattatcaagataagtagcgataatgactacttatctttttgtttaaagaaaggaaaaattaatgacaaattggttattctatttaactagtttcattaatcctgagtatcttgatatttttagtagtttggtagattggtggcaaaaatcaaccaattcaggtgattatgatccagccaaattacaaaaagtaactgaagctctacaaaatgcggcaccttatttacattatgatgattttttgggacgtattttgaatcagacaaaatggggtatagttaagatcttttatggatttgccaattgggcaagtgaactagcaacagatagtttggatttctcaggaatcttaaaatccacaggtttaaacactaatttaattaatggggtaatgggaattgctgcagggttgatgattttaaccttaacttgggtcggaattaaaattggtacctcaagtaaagctcctcaattaaaaaatgtcgtttggcaattagcaatttcagcgttcttaatcggaaatattcagccaattacaaattgggtggttgatcagtctacaggtgtatataaaggctttgtacaggctgataatgataaagggacgtcaagcttgccatatcaggtagtacaagccaattctaatgacctattagcaatcatagctaataattttagtggcttcaaaatcaataatggggatactaataccaaatgggaaggtgtttctaaagataaaaatggtgaaattaaagaccagagacaaaaagatgttcactatggttcatttgctatgaacaagtctgattttgatactgcaacatcaggcgatttatcaactactatttcagctgatttagctgagaaattaagtaataaagcaaataagtctaaggaaaaaccagcatgggatcctgacaatttgcgttataaattagctcctacaggcgttggtacgaaatcaaatgtaaagggaaaagcatattcaggatattatgcaaccaaagtaagtcaaagcaatactgcctttttcaaaatttttaacggtggatatgaacgatattcagtacaatttttcccagttgtagttgccttactttcaatgacagttgccttcttactagtttgctttgtttcagtaagagcattcgtggaattggcaattatgcaagtattatcaatcattattttctccactgatttggaaactggaaagcgtactaaagctgcggtacaagatatttttagttcagcgttgttaattgcattccaaggctttgaattagcgttctatagaattgtagccgtgtggatgagttcatcagatgcaggaaagattcatgataatccttatttatatgcagttggaatgattgctttaacttgggcactttgggaaggttcaagcaaggtgcaaaaattctttggtttggatactggacttaagcaaggttggagtaaagttgctggaggaattgcagcaactgaatatattgctggtaaaggtaaaaatttagctgaaggcgctgttggagttgccagaggttctggtaagttagcaggggcagcgattggtgaagctcaagcttggcaagctggtagctctactaaggctattgctaaggaaaatggagcaagcaatagtgaagcaaaacaagctggcagttatgcaagaagagcctttcgttcagctcataacgactttaagcagaatggtggcagtgcagttgattggaacagggcagtaaattctggcgctgtatctgaaactgtacaagatgaagccgctagaatgatgagaaatggtggtttaactgataatcagtacaacactttacatcataatccatacatgcaaaacagagctgaaaagaatggtggcagtgcagaaccaacaggtattggacgtgatacttcatttgtaggaaatccaaactatgatggcaagaaagaaacagttgcaacaagcaatgttgattcagctaaaaatgtaaatgaccaaggtaagaatacatcagttaaacctgataatattcaaaaccaaggcattaagaccgatgatagcaagcctaaatcaaatgctgctaaggaaagttcaactgacggctctattaagtcaacaggtggagctaagacaactggtaatgatgcaaaaattccaaataccacagttggtgaagcaacgaatggttcaaagactggtaaaaaagaaacagcaaatgatcctagaactaacagtgcttcagttactggttcaggttcaaagcgtggtgaagcaaatagctcttcaagctcaccaacaagtagtaatgcggtcgatgaattaccaagcttgagagatactcaaaaatccactagtaagttagcaagtcaacaccgttcaaatcaacaaaccacaccgccaaaaccagttggtgaaggcggtagacacttaagcaatgtttcagactttaagggacaagacagtcatagtaaagtaactgaaactgctggtaccaaccatgtagatattgaaagaaaggctggcagaactgaagtatctactcatgatgtaggcaatcaaggaatgagtagtgtgaaggatgctatgaagagcagcgtaccttcaaacactaatagaaccgttgaaactcaaggcaatactaacacggtgactgaaattaagcatgataagaccacaatcaatcagcaagttgaaaactctactgaaactaaatcaccaagttctaccaacattggcaaattaggtcatggagatagcagaagaaaggattagtgcatggataaatatcaaaaaataatgattcctaagtcaactaatgtatctatccaaatctttttcctagatatgtttgatgtttttgctcttttcattgggggtatggcaggacaacaaatttcttttctatttaatttacaaccgacttggcaattagtaatgacaggttttggagttgtagtaggaattctgctagtaatgcgaacccctctagcgccaaagattagaaattatcgtgttttgttaagcattatgcgacaagaccaaagcagatattatccattatttttagaaggagaaaataatgcgaacaaaaagaaaaagtagaaacagtaggagcaaagctcctagcttgtttagagcttttggcttagataaaggatcaagacaagatgcaagagatcaatcaatagttgaatacttgggctatagtaactgctcaaaagacgggatacttgatttagtagatggcacccaagcacgctatttgcgtgtacattcgacagatttatattcacttgatgatgaaaccagaagtaaatacctagattcatttactacatttaatcggatttatagcaacgattataaaattgtagtcatgtcgacgagaattgatactagtgaacaacaacagtatttttgccatttaaagaatgggattcgttcacccaaaaccagatatgaaaaaatgcgtttacgattagttaatgaaatgttgttgcaatcagtaatgctgtcaagaaatacagaagattactctgatgtgcagttttacattatgatttttggagaagatttgcacgatattagagttaacactagaaccgctcaatttgctgatcagggattaatgggattaagaccattgaactataaggaaacagttaaggtactctttagagaaaataatttgaatagtaagtaagggagaaaaatgcgaatttctagtttattgaaagcgaagaaacataaaaagaaaaaagtaactgtaaagttaaatccaagacaggttactagtttaaaaaagcaaagagaactacaaaaaaatggttataataccaaatttttagcagaagtccagccacaaggcgggattacttttgcagacaattatgcaattgctagtgatggatatgcggcttgtttatcggtaattcattatcctaacgatccattattactttggatgactcaagtggcattgaatgattcaacgttaactacaattgatgtaaaaactgattctggttatgaaattaagcgacaactgaacaggtcaattgaagaattagctgatagacaagttaatgcgagaaaagctactgatgcattaaatgcacaaaaggatatgcaatcactagaaaagtatgcattggaattaagccaaggcggtgaaattcctaaattgatgctaactagaatttttgtttatgctccaaccattgaagcattagatcaatcggtgtctaatcttcgtggcaaacttcggggtgaaggttataatgttgctgtttatatgtttatgcaagataaacagtttaaatcaatggcattaccaatcacagagcaagaaaaggatttagcagcattgccagaacaaccaattccagccttaacggttggagctggtgacccattttcagctcaaagcttaaaggaccctagaggagtctggttaggtcgtacttcaactgggggagccttttattttgatcaatttagatcaactaatatcagaagatcgtttaatatgatgatcttgggtaagatgggtgctggtaaatcaactttaatgaagatgttggttgaaggtacaattgctagaaatatgtactttcgtggaattgataagactaaggaatatattcctttaattaagcattatggtggaaccgtggttagcttggatggatcagaaggtatgattaatccccttgaagtaatggcaactactgtagatgaaaatacaggtaaggttgatgagctagcaagtttttaccaacatatttctaaggtagatattctattccaaatgattaataagggatcctttgtaaatattgaaatgcaagaatttgattcattgttacgtggattttatgtagacatgggattattacctagaaattttcaacaaaataaaggaaatataaaaattactaatttagatagtgaaaaatacccgacttttagtcagtttttaaattggctaaaaaaattggctacgccaatgtactatcaacaacatcaatttactgctgaaagaataagaacttatgaaaaaatcaaggtagcattggaatcaatgattgagaattacggtcaattatttgatggttattctacaatgagagatttgacagatactaagcttctactatttgattcttctgctatttcaacaatgaatcaaaatgtttatcaggcacaattgtatatggctctaagtttaatttggagtcatgcattgataaatggtagaaaacagaatgctctgttaaaggcagggaaaatcacacgtcaagatgtacagtattttgatgtgttcctggatgaatgtcataacatcataaattatgaaaatatttttgcggttgattatgttaaaaacttcgaacgagaaatgagaaagtttaatgcaggtattatatttgctacacaatcaccagaggaaatggttcccgattcggtagaatcagctcagctatcaagtttaaaagtggtattcgagctttgccaatacaaatggctaatgagtatggatccatctcaacttaagaaaatcaaaagcctattaggcgaagcattaaatagttcagattacagtaatattcctgacttgcagacaggacaagcaattgtcacgatgggaggaagagaaagatatcaggtcaagatgaaaccatctgaacgacaacttgaaatttttgcaggtggtcaataatgataacaaatattaagcggttaagacagacgaaaagatgggctggattagccgcttttttattaggaattttagctgttttatcagttatatattttattgtaattttaattgcagcaatgggagctgctacagatgatgaatgtgatacaggaggagaacaaggaggagtagtagaaggacgaattagtgtcattgaatcacctaagtatggacagaccgctatgatgcatatagcggatgctgtgcatgagaaaactgggattagtgctagattactttttgctcaaatgggacaggaaacaggtaatggtgatagttcagttgctaaacatgatcataactttggtggtatgacttattcagaaggaagcactatcggtaccaaaggtgaaagccgtggtagtgaaggtggtaattacgttcactacaagaacttaagtgattttgcgaccgagtgggctgtgacggttcagaatggttttaaaaaagctggattaggaaaagatgctacagttgctcaatatgctcatgcaatgaaaaaagcaggatactataccgcagctgaaagtgattaccaagcaggtatggaagctcaagctaaaaaatatgatgccttgaaaggcaataaatcactagctaaaggtgatgggtctagtggctcagataattcagctgaggaagattgtaagccaataagcggcaaatgggggtggccattcaagtcaattcctaaaaaaggaccaggtaatacaatctcaggtgagcaattatttggtaagtcatctacaagaacaggtggctttcatgatggtgttgactttggtactgttccatatggtggacaagatattttggcaattcatggtggaaccgttaagaaaattgcatttcaaggacatactcaagatggtctaggaatgtacgtttgggtagaaggctccgacggttggaatgtcatttatcaggaattcggctttgatgaagcagatttgaaatacgtcaaggtagaggtaggcgacaaagtttcagtaggagataaaataggtcacttagcaagtaatgcacatggtattactcacgttcacattggtgcaactgaaaaagattttgctaccgcagagctctctgcgtacaaagatgatggtacttggaaagacccaattaaattaattaaagatggtttgaacaatgatgcagaatctgaagaagatgatggcttatcaaaaactgaatctgaagcacgtgactggattgttcagagagaatctggaggtagatgggacgcagttaacccagctaacccaagtgtttatggacgttatcaattaaagagagaatatcttaatggtgattacagtcataagaatcaaacaagggtagcaaataaatatgtaaaaggcagatatggttcatggcgtaatgcacaaaaattctggatgaaacatacctggtattaatgccaagaaagaaggataaagatgaagcagcagaaaaaggagcgagagtccaatctgaaagtatggatgatgacagctggagtattattcgctgttctgggaatgtttgcaattgccagagttcctaaaaatgatgaactgaatgatattagggcagaaattaaaactgttgagaagcaaatagttcaagagcaaaatagtcaaacaaagaattctgcatataaacaaaagtttgatgtggtgagtgcagaagaagaggcacgtgacaagtttctaaaagtgataccagctatctatactaaaagaaaattttcgtcagctaaacaaaaagaagaatttagtgcttggacaaaaatttttccaggtaaagagggcaaaaacttcatcaaaaataatggagattcttatggttatttaagaaacaagagtacaacggtttactttggtgacttaacagatgtaagtcatactaagattacagtagtaaccctagtcgaaagtgccaataaaaaagaagttacttatggttgggactttgattataatcttaagacccaaagaataaatagctttaaagaaatcaacatagagaggaactaagatgaataaaaaatatcttttaggtggagcaatcctcggaatcatgctcgaattaggcgtaatcaattatgagactaacaagcaaaaagctatcgactatcatgttggtcaggcaagaactgagttggctaaaaagcaagatgagttaaaaaatgtagatgctaaaattggaaattcgcaaaagcatattgctatgaaggaaggaggcagcaaagagaaactagctgagcaggatgtagcacagacaaaagccaagaaacaggtaagtaaactgctaaaactgctttacacgtatgatagtggtgatgaaaaattaaaaataccagacaaggtgaaagatacacatttagtaagtgaaaaagtcttaaagaacaattctatgtttaaaaatgataagcaattagagctccaatatagtggggcagatatgacaggtcagattgatgaactagatttgaagacaggtattttagaaaataaccaagtgcctgtatatgccaaagtttattttgaaatgacaaaagatgatagaactttgggaacaccaactgatgcttaccagctgatttatgatacagcgactaatcaaattacttcaattaagtattttggtcgctatcaaattgatcgtgaggcagattaagatgcaaccgaaaaaagaaactaaggtaaaaatcattgcagttagttgtgcaatgatttttttgttgttcataggagttattggttttaatcaacatgttaatcatgaactaaatcaaaaaaacatcgttaaaatcaaaactaatgatgactcaacagttttattttatcgagatgactgcaaaagctgtcgttctattttttcatacgctgtaatgaaaaaagatttatttagaaagaatatacagtttgtaaatactaatcaaccacaaaaccgacactatattacggagtataagttaactaaggtaccaacttttatccatttaaagtatggaaaacaagtagaaaaatatacgggaactaacatagaaaagatagatcaggtcataagaggtgattaaaaatgtctagtcgaattgtatatcaatcagaaaaaactaaactaaaaaaatcaaatcatcgtttgaaattagttgccttagttttgtttttgttatcagcagcacaactaatggcaacagtttactttaatcgtgataatccagattcagaaagtcaaagacaaattcgagatcaacaggagcagattactgaattaaaacaggaattaaatgatagcaaaaactatcgtgtacattcggatgacaattagaaaggcaaaaaatgattcaaagcaaaaacaaaaatgaattgaagcgacaccaaaaacataagtatcgcaaaatttatttatcattcattggagtggtggctgcaatttttattgcaatcgttgctagtccctattggacaggaaaatcaattgacactgagcaaactgttaatgtagtgacaggcaattcatcattttacctagcaaattctatttacaataagcaaagcgaaaagatgttgctagagtattatcttggggactctacagacgtaacatctactagtgacgattcagacttaagcaacttaaagtatgctataagagtagtaaacatgtcacgtggcggagaagatggagaagagcttgcgatcaaatcacagaaaatcaataatcactttttagtaattgaggttagcggaatcaaaaatggctttggagatttaaagattgatattctgccacaaaaagttaataagcgagttaacatgcaagatttctctgaaaataattatattgagttcttcattaaagagaataaggttgatctgacttcaagcaaagtaactaagagctatcaaaactatatccttgattatcgtcaatatctgattaattggaataaaaagaagattagtcaagaacaaaatacaattaaggatgctcaagctacgattcaaaattctcaaaataatttagattctgcaaaggcaaagttagaaaaagttggtgatagtcaaaaagaaaattaccaaacacaaattagtagtttggaaaatgatatttcagaaaacaaagcagctatcacacaaagtcagcaagcaatttctaaatatgaagacacaatcagagacattaaggacggtgattttgataattaggtgcaaaatttagctaaaaaatgttacgtcttggacgtaatgagctacgtaagaatacgtcctgttcggatatcactaaaaaacattacgtatcaagacgtaatgtcaggtaaaagacgaacaatttagaagtatacagacgtcaaattaatcagaagtgatatcacttctaaaaatgcgaaatcgcttggtacaaccaagcccagcacacctttataaaaggcgtggggtcagatttcccttatgctctttactagagataactaaaagaagcagattttagttaaatttcagagtagaaactagaaggaaaactagaaactagaaatcagaggaaagaaaaattatggtaaaagttttaatccgtggaatcagcgaacaaaacttggctagaattgatcggattgttaatcaattaaatcaaaattcaagtaagaaaatttccagaaatcaatttttgagagaacaaattgaacaaattccaattaattttcaaaatcaaaatgaagattcgcaaactagtttattgattcagaagcagaataaacttctgcaggaaaatttattagggctgaatgttcttgcaaagtatttcattagtggagatgttaatgacaccgaacgagcattaaatttgttagatagtttgtcagaagacacggcaaaagaagatgattaaatttagaaagagggcaagaaatgggacgacagcactttttgcaatttcgactcaacgataagcaatggaaagaaattaggcagattagaaaagaacattgctttgataataatggtcaactttataagttcttattcttcaatgccatgttaggtgttcaaaaagaaaaagaactggaagagttacaaaaaattaatcaaaagattgataatgctttgaaaaaaagacaagaaacttacgctgattaagaggaccagaaaaaatgattaagacaacttttagagcgacaatttctgatacagatttagattggattcaagattataaagaggaacacgatttaaaaaataatgctgaagtaattcatcatcttatgaagttagcagaagaaaatgaaaaaaaatctaagtggacaaaagatttaagtgatattagaaaacaacagcgatttaccaaagaacaagttgcaattctaacagaaatggtaagtgagtttttgatgactcaaggaatgcaaattgtcggaaatggaattgatgcagaagtttataaatctgcaaagagaaaagtaaaagaaagaattaataatagaatggaggaaaatggcggacaacttgagtaagttttgatgctgagattgcgattctacggcttttaaaattgaaagagcaaaataattaatcaacttgcttcatagaatttttatttgtaggaggtaattttggggacgaccagctataattttaacttcaaaattttctgtgccgagttcacgaaaagcttttggacgttacgttggatatatagccagaaaagaagcattagaagaaaaagaatttttaactgcagaagaaaaagatgaattaagtcgagttaaaaaacaagtaagaaaattaaatcaggaaaacaactttactagagtaaaaagtgaagaacattctgaacgagaagcagctgctgaaaagttaatggaaaagagaaatttttttgatttgaatgataaggaatttgataagtatcttgggtatatggtacgaattgatgcattaaatcagaaaaagaacgaaacgggactaaataccaaagaacaaactgaattggaaagaatagggcaagctgcaagtaagctgagtgaaattcatccaaccaaagaaaaagttttagatggagtatttagctctgacaaagatattgttcagttgaaagatttagattatattcgtgagcaattaaatgaaggacaagagaataattctgtcttgtggcaagatgttgttagttttgataatagttttttaaaaaagaaggggattttatctagtacaactggaatattaaatgaggaagaactacaaaaggcaactaaaaaaatgcagagtatttttcaaaaggaaatggatccaccattaaatgagatgtactgggtggcttccattcatagaaatactgataatgttcatattcacattgcaacagttgagaaagacccaagaagaaaaattataaaccgtgaagggattagtcaacctaagggtaggcgaccacaaaaaataattgatcatatgaaaagtggttttgcaaatgaactgattggttcttcagagatgactaaagaattatctcagagacgtcaagctattagagaagcaattcaggttaatttgactagtcaagttgaacagccaacttttcaagcagagataaatcaatttgttagagcattgcctgagtcaagaagagaatggttttacaacaagttagataaaaatcaaaaaaagatgtcggatcatttggttgatgaattgctaaaatataactccgattttcaaaaatataaagacttagtttggaaaatgcaagatgaccgacaagacttatatggtaaaagtaaacgtgaaaataagaattatgcaattaaccaactatatggcaaagaaggaatttatgcaagaaatggtaacgcattgctagctgatttaagaaaaattgataagcaagctaaccataatcaaagacataggattaattttaaagataaagttgatccaaacgaatatattcaatccgcattgaaagaaattcgtaaggatacaacaatacaaaataataagataaaatcaaatgacgactatacacttcattcacatattattaagcgtagaaaaaatctaaaaggacatatttacttaaaaaagccttttatcagtcaaagtcaaatacgaaaaattaaatctaaccaagaaaaagtatttgaaaagacaaatgcagatattgaaaccaagaagaacttacgtgaatttgagaaattgcaaaatgaagttgaacgagaattagaatagaatcatcttaatttgtgactatatagttagtcgggtataggtggggaaattagcaagtagttttactacttgcttttttgacgttaaagaataggagaaaaaataaatgcttacttttacaaaggaacaaattaaggcagctaattcagcgagtattgttgaatatgcaaggagtgcaggaattgatttacgtcaaacaggcagcgatgaatttaaaggggtagaacatgattcattggtaattacaccatccaaaaattctttttactggaattcaagacaagttcatggaaaaggtgcattaagcttttctacattgtatgaattgtcaggtagcaatttaaatgaaaaagagaaattcctaaaggcaatggataaggtgttaactagtggagtaggtgatggcaaagtttatcaaattaaaaaagaacctttcaagtttgataaaaatcaaatagattcagaaaataaaattaatcgagtatggggatacttgcacaatcaacgtggaatttcgagtcaaactatagatcaattacatagagacaaagtgcttgcacaagataaattgggtaacgcactttttttgtggcttgatcctcaagatagacgacaagttaaaggagtatcaaaacaaggtacaaaaattaatcatcaaaaatatggtagaagaggaaccctcaaaatgattgaaaaaaattctaccaagggatatggtttttcattcgattcaccaggtatgaatggaaaaactccagaaaatattagattttttgaatcaccaattgatgcaattagtttctttgacttgtctaaggtaaaagtaaagggtggaatgaaaaatactaggtttgtttcaatggatggccttaaaaaagaagtgtttgactcgtatataacacaaacagcagcacaattacaaaaagaaggtcgaattcttaaaagtgtaggtttaggtgtagataatgatgaagctggaaaaagatttgttaaagatattcaatctaaatttcctaaagttaaatactgtaaacctagtgaaaaattaggtaaagattggaatgacaccttaaaagcttttcggaaaatgcaacaaggaaaacaaaaatctaagcatacaaccagaacattaccaggacaagaatttgaaaagcgatcggcttatttgagaagagaccaaggattagaaagataagcatatagaaaaagcagttagtcagtgactagctgctaatttaatgcaaaaaaagaagcacataccgctttccgtatgtgccgctctttaatgagtctcactgatctattcctcgccttctttaagctagcatatcgctaaggtagtaggcagccaagttgtaaatacaactctttaatttgcactgtgatctttacctacattgtaacatgaaaggataaattaatgaataatagacattctgactagcatatcgtcaaggcagtgggcaacatgatcaagtaatgatccttaatttctactgctattcttaaactttttttaacacatattcaataagaaaaagtgtaaaagaaaagtccctccaaacatcgaaggactttttgaaaagcaatgcactacgctctcttttgccatacgacaaggcagcgagccacctgaattgaaaattcaaaaccttaatttgaaaattgcttcttcaattaaatttattgtagtgtaaaggagaaaaaaagtgaagagattagaacaaactttgaataagcaggttaaatatatacctcatggatatcatattatgcgaagaagagatcaaagattagaaagataaataataagaaagagcagctaatcaaaaactaactgctaatttaatgtaaaaaagaagcacataccgcttgcgtatgtgccgctcaaaaaacaaggattattaattaaatagtgctaaaattgtaagtaatctaactaaacggaaagtaagtgagaacaaatgagtgaaaacctagaccttgcaaacttcatagtctcttttggtagtatgaatgactacagtagtactgtgttgcaaacaaaaagagccttagatcttaatgacctatctaagcttgtacatcaacaccacgatggtgccatcttaaaagatgctttagatggcatagctgcagcaaagaaattcggatttacaagacaaggaattattgaaattaataaagcctttacccatagcgaagaagaagacccaagtattccagggcgcttaagacatgcaagttataatccagacgacgcaattgtcattatcacagaccctaaaggcacagctaaaggtgcatactttgctccagaaaacgtctaccccgaagacttagatgaaataattgaacaatacaactcgtctaaacagactactaaagatgcgtggagagtatttgcaagcttatccaagcttcaaccattccaggacggaaataaaagaacagcgctaattgccgcaaactctgctcgagatacctgggaaaccagagattatttaacccttccttttgacaacatagaccacgctgaatttatgattagcctcatgagattttatcgtgcagatactagagaacaagaagacaaagctttggaccgaatgatagaaactttacctagcaagaacgaagttgcgtatcatttgagcaacgaaatttcgcaaaaagatattgacattaatgacctaaaaactaaaagaattaaatcattctaccaaaatcaagaattagataggtaacattaaagaatcgcaccaaggcttaaatagatggtataaaaaacgctgaaatcattgaattatcaaaacttcagcgttttttattctcagctaagacagtaaattatcttcagcagaaacgtgtaaatttaaaattactagaaagaaggtgatagtagtaaaaactaaataacttgtatgtagtcaggacacttcattatgaagcgtcttttttgttttcttagaaaggaaaaattatgtcaacacgatcaaatgtatcaattttaaatccaaatggttcagttactactcagtattttcatatggatggtggacttactttcacaggacaaaatttactagataattatcgtactttagacgatgccaaaaagttaattgaaacagggaactataacgataaccatattccagaaaatcctacagctgctactaaacttatggatgaatataattctaatggacaaagaatcgatgatcctgttagaaaacagtatcatgacttatctgcgatgattaacgatatatcaaagaatgacggtaagtaccttaattcagatgtagagtatcattatcttttttcaccaagcgctgaaggaaattatcaatggcacacgattaatcgaaatggtattaagcccctaactcaaaaagttattgatagtgaaaaagaaagtggaactttagccgatgtagattggaataaatctagttttacttctgattgggcagcaccattaactgataaagagatatcgagtcttaatgatgatatttcacttcagtcacaatatcttgatcgccttcaaaaatcaaaaccagaattagtatcaggtcaagttaaagataaaatggatatggataaaaatgctttaaagtctgaaagacgacctagaaagacttttgaccgtaaagcttggaaaaagaaacatactcaaaccgttgaggatttaaaaaatggactacttaaagaagtagataattatactcaatcaccagagaaagttgtagaaatgcttgattttatggataagtttcataactattcctcaagaaatgcaatgatgattcagatgcagcgcccaggtgcgactgcggtgggatcatttgcaaagtttaaaagcatgggctataaggtcaacaaaggtgaaaaaggaattaaaatatttgttcctactaaagctacagttttctatcgtaaaaataaggatggcaacaaagaattagctaacttaaagactgccactaaagacgaaaaacaaaaaattgaggcgggtaatatagaaacttaccaaaaaactttttataagattggcactgtattcgatgctccacaaaccaatatgccaaaggaaaaatacccagaactttaccctaatagacaccaagattttaatatgaagaatccaggacagattgactccttagagaatggattaagaagtgtagctaatgacatgaaaatgccagtcattacttatgacccatttaatgcagatattcgggataaatataaggatacgcaaaatgctaagggatactttaacagggctactaacgaaattgtgttaaatggatacaacactccaacggagaatgtatcagtgcttgctcatgaattgggacatgcacagctacataatagccaaaaacaagaaaagggcctgcctagagaattaaaagagatgcaagcggagcttacaagttatctttattgttctcattatggaattgatgttaagcaagagacagttgattatatagctaattggacaagcaacggacaaaagtttaatgagttaccaagtggggtaaaagggcaaattttgacgcatgttggttcagctactaagacactaactaatagtaccgataagttactcgaaaaagaacaagaaaaattgggtcaaattgtcaaggaaaacttcttagatactcctgaacactcgcaatggtatgtgcaaaaagaaaaaatggagcaagaagttactgacaatgagactaatggaactaattttaagaccgaattgacggcactaagaaaaatcgaaaaaagtatgacaatagatacagttagaaatttggatgatgcatttaataaaacgcagtgctggacagcagatggcaactatagcaagttaaccgacaatttacaaaatgaaattgaaaaaaatcaagaaaagtctaaattgcttgatgataaagaagtgcaaactagcaagccacatgttgctacagtaaacagttcgctgaccaatgaaaaagcaaaagaaattgctattcaaaaaggtgaacaggaattggatcgttaaaaaatatcaaaaatgcaaaatttgatatgaggattgcaaagcagttagtaatttattgaacaagtggtgagtaaataattttctaaatattactcttatataggctgattccattgatttagtagtataatatcagtataaatgatatgaggggtgcactactatggcttcaattactaaaaagagaattcaagtacaaattgatgatggtgtggtagaagaaggcaatgctgttctaaaaaaattaggtttaacacctactattgctatcacaatgttctataagcgtcttattgctgagaatgggttaccattttcaaccaatttaactgaaagagagaaagatgaattagaaattcaaaacttaacaaaagattgggcaacagaagacctggatagccctgagaaactgcaagaatggatgtcaaaagatgagtaaaaatattgctacagcatatgttcgttttgttcaggtttcaggtggtaaaagacgaccaattttcatattacaggaaactgaagataaggtctttttctttgatataacgacaaagtttaaaaataaatctgaagaaatcaaaaagcattattttgaaataaaagaatatgaaaacacaggtttaaaaaaacattcatggattgatacttatagacgttactcggtatctaaaaaagatactaatgttaaacatataggtagattaagcgatcaagacatacatagattagttaagtttcttcgtaaaaacgctaaaaaataattttacagtctcgaaaaagcaaagctagagagcaagggaattgacttctacttctactctaagtacctcaattgtaacaatgatcaacaattgtacaactactttagaaagatgattagtcaaatgaataaagtcattctggaaagcattaaccaagttaactagtcttttatatatcacaaaaatgatatataatataaatgcctccattaatctatttttggataatgagtatgctatgtaaagaataccgtgaggtattctttttttgtagaaaggaatagtaacgtgacaagattacttattttaaatgaaaaaaagtctcaagcagaaaaatttgcggattatttaggtggaatgagtggcgaatttgaaggaaatccatatgatattgtttatgccgcaggacatttattacaactcaatgcgcctaatgaaatggttgacccaaaccttgcagctaaatatgcggattggcagaatttagataactttccttggaatcctctcgatttaaattggtcaaagcaagttattaagtccaagcaaagatacattgataatattaagagtaatttgcctggacatgatgtaattattattgcaagcgataatgacccatctggtgaaggtgatgtattaggttgggagatagtagattatttaaactggcaaaatgaagtctggcgaattcgttttaaaggtgatgactcagctaactatgtaattgattccttacataagcctgagaaggctacagttagtgaacaagatgctcaaggaattttagtaaaaggaaaatcacgacagagatttgattttctaacaggattagaagaatcaagaattgcaactgagttggcaagagaacagggttatagtaataaaggtaaggcgctttcaataggacgcttgcagacgtatattacgtgcttagttgatgagcaaaacagagcaagaaaatcatacgttaaaaagcctttctatgaaataaggtataaggatgcaaacggcaatacatttaagcgtgactatcaagacggtgatacttggcgtttttcagacaaaaatctagtaggtcaagatttaactaattattctcaagatcaaattattattgatagcacaactgaaaaaagaacccagccgccaaagttagtcaacttggctgacttaggtaagattttccaaaaggaatatacaactgaacaaattactgatacttatcaaaaaatgtatgatgataagattgtttcttatccgagaacagaagacaacgcaattacgattgatgattttaacgagttactaccatatgcagataaaattgcagcagtcgttggaattgattcaaaactcttaagtcataaagacccacgcaaaaaattcataattaagagtgaggatcacggagccaatcgtccgaccaaattagtaccacaatcacttgaaaaagttgaagacaaatatggtaaatgtggtcgagatatttatgaacgagttgttaaatcatatctagcaatgttagctgaggactatgtatatactcaagttaaagcccatattgcaaatcatcctgattttacaagtacgattaatgttcctaaggaactaaactataagctgatttttaacgaaaatgatttaaatgaagaaaagcaatcagaaaataaggctacacattttgctcaaaacgctagccctgaagtatatcaaggtacaaatacgccaccaactaaacctactttaactttcattttgaataacttggataaatggaacttgggtactggtgcgactaaaatgcaaacaattagtaaattacaagcaattggtaaagaaaataaaaaagttattccccaattaaaagtagtaagaggtgtttttgaagtaacaggaactggcgcattgattgcttgcttagctaaagatacctatttgtcttcaggaaaaattacaaaacgcttgcaagacattttgaatgaaattaaggctgatcccacaaagcaagatatggtctactcagttgcagaaaagacaattgaacatgataaagcagttatgatagaaaatgccccattattaaatcaagatgcacaagttaaagaattagctggtgatttaaaggcaattgaaagatttagcggagtctttactcaaacaaatgaaacagtaaacccaccagttacgatttttgatggacatacgactactgaagtggagcaacaagaagctttagaagggaaacaaatcacctattcgattgaaaaatttggtaaagaagaacaacatacggcttatttagccgaacaaacgtataaaagtaaaaaaacgggtaaagagattaccagagttggttggaaagtagagtttcctgaagatactgatcacgttaaaggaatctataagcctttagctaaagagattaaatttaaaaaagaatatggacaacatgcttttagtgaggaagaaattaccagcttgttggcaggtgaagaaatcagttttgaagcgactgataagcaaggaaaaagctttacggctactggaaaattgatagaacaagaattgaaagaaggtagacgtaaaatcaggttctggggctttagagttaatcctaaacctgtagatacaaatgtctatgtagtgattacatataaagacggtaaagaatatcattttaagaaaacatatcgaggtcatcgttggacccctgaagagattaagaaaattgcggcaggaaaaaagcaaattgtagctttcaatggtcgtaaaggtacctatcgaatggagattaagcctaatcccaataagaaatacaatggcagaaaatattttggttttgatgagaaatttgctaagtagaggtagtttatgaaaataaatatgattttgtcctttctaagacgaacagccctgtttattgcaactatgtttgcattttttgttcctgctaacgcaggtgctttggcgcaatcaatttgcaaggtttctacgaagcatttaaattccaatattaattttgcgacggtcggctttggtatttcagtaataatttatatttttctcttgtcgatagggtatctaaaatcagacataaaaaaatcaaaggaactaaaagatgaaaaaaaagattcttgataaaacaattggtattggtcaaatgatagtaactttccttatttatgcggtagttcaaggattatttatgattagagccaaacaattaagctgggttgccgttatatttatatttggattaacggttgcattactgagcttgatctacggaatttaccaaagaagacttaatcaggtgaatgattggcactttactagttacaataaaactagaatgccaagatttactctaaaaaattggagtttagcttttcttggatttttagtaatttgtattttgcaaattttagcaggatttttgattaaaggggaagccactaatcaagcaaacatagctacacatcagcaacagttgaatccaattattaatgtaatgctgattgcaattggaccactttttgaagaaattatttttagaggtgtttttttcaattggttttttagtaaaccaggcaaaaaaacaacattatttattgctattctcattaatggattaattttcggactcttacatgaacctcaaattgatttgtttacggttttatatgcactatgtggctgtgtattagctgcagtgtacttaaaaactaaagacctaactttttcttatgtcacccacttcagtaataatttagctgtttttttgataagtagtttgtgaggggtgaaattatgaaaaaagataagtatgaagatgctgcagaaaggcttctgattaacggacagtataaattaataaacaaaaatgtaaaatggatgtctcattcacttagaagtaggacaaagtctctaatgagatatcaaaacttgaatgaaaaagaagcttttaaagaaattgtacaaacaacgcaagatgctttaagtacaacagattttagaaaatattatgataataacctagtttcataatgcactatgtatcgtataaaaagtcatcctaaaaatattttttaggatggcttttgttataatagttaatggcgtttgtgccttccaatatcaaatcttgcattgggaggtgaacatatgcgagatttatttcttcttttgtggagctcgattttagcgcctttattagtgaatacagtttcttatgtcttaaagaaattgtttgatcagcggctagtcaatggtcatagcaaaaggcgtaaaaagcctagattgggctctaaaagacatcacaaacgtcgctagcctcagccaaagcatttagcatatttgatctaaactttggtgaagcaaaaaatcgttactcatttgtgtacttagagtagcgattttttgtgtcttaattttctcgcatatgcaagatgtttcttcttttgtatctatatactaccatgattttttatttttttctataattaatatttgtggtatttaaaacgaatgtatcgtcatatttcttaatttcagcatagttttaaattcttgaaacaatttttgtgatacagtgagttaggggaataaaaaagcctgttgattattaccaagttatcagcaggcttagaattaaaagaagtgtagtgacttcgcgattaaaaaaattattgctagtagcaccttaggggtaactacaagtctccaactacgttttgagttatggaacttaaagtccatagttgttatctcccttccagcaagtagcagtaactacttgctttttttgctattttaacaagttaaagatactaaaaatcatataacttacatgatttaactataaactatcaattcatctttgtgagctaagttcaaaaaaggataaaatcctaatttttaatatttaattttaactgatcttgtcagtatctccgaaggctgttcttactttgatctacttaatgaattttgcaatatttctttatttgtatataaaaaatacggacatatcaatatttacgttgatatgtccgtatttatatagcttatttttctttaccttcgaataagtctccatgatttccaattctgactagtcgaataattggattagttttgtgaggcttgtagataactacaacatcgactttgccatcgcttaaatggtaatcaaaatgtccactgtaattaccacctcgtttatctaatggatggagatcatagccgtcacccactttgcctttattgactaattgattaactgtgttcttgaagtcttttattaactctgggtggtcttttttaaactttttgtagtcctttttaaattgtggttcgtatttaacagcgtacattagtcctcatccaaagatttcatcaaatcattgacattagtgaaactaggtgaatcatctggaaccaaaccttcatctttagcatcagctaagagcattgctttctcagtaactttgttaggaatttctggctcagttaaaatgtcaaatggaactctcttttgtaaaacaagctgttttgctgccataacgaaataagcgttcattgaaatgcctgcagcatctaagtctttctgcaatttctttttcaaatcgtcatcaagacgaattgtagttgatgatgtcataaaatcagctcctttttaatgtcctatcattataacatacaaatgacagcataatgtaatagatagcttaaaaactaaagatagttattcaaaaaaagaactaatttttattgacgtatcaaaaatatgatatacaatataaatataagttaagtaacttatacatagcatataaattacggaggacatgcatatgaagaaaacgtcaaaatttgataagaccttcttggcttggatgttggtcgcacaagtagtagtgattactacttggttgtatcttgcatcagctggcttctttaatactttgccagtataaagcaagtataaacaaaacataagtagattatacgtaatgtatgaataaagtaaggagaataaaaatgaagattattacttttgcagcaattaagggtggggtaggcaaaaccacattagcctataactatggcgaatggttggctaaccaaggatcacggattttgtttatcgacttagaccatcaatctaatttgacccaaacatatcaaatttatgataatgagtatacagtagggaatattttcttaaagaatgatcaagttaaaatccatcagattaatgaaaatattgatctaattgcaggagatatgcatttagacgatattgaagcagacattgaaactaaagtcgataaaaatatgctgctatacatgtggctagcagataattatgacactagaaaactagatcaatacgattacattattattgattgccaccctgatttttcaattgcgacaaagaacgcagtgattattagtgatgatattcttagccctattactccgagcgaacacggttatagtgccaaattcaacttagagcagcgctttaaggagcttaaacgagaaacaatcgattatcgtacgagacagtcgttagtagatgcaaaattgctatttgttggaaacatgattaaaaacaacactagatcttctcgtgaattggtagaagttttacaaaaagatccaagtgtcattgttaagattcccaatcgagagctgtttaaccgctccactttagataaagtggcaatcagtacaatgatgaaagataaaaaaatgcaatctaggtatggatcatttttcaatgagttaaatggtatctttggctccattacaaataaagtataaagcaaatatacattaaatataaactaagtatacgtaatgtataaataaaatatgaggtaatgctaatgaaagtatatacatcaagtggcgtatatgagatcaaagaacatcgagtaaaaattcttccaagttattttgaggcacaagtaaataactctaaaaattttgaaattagaaaaaatgatcgtaattatcaggtaggagatttgctattgttggaagagtataatccaacaaccgcaaattacacaggacgagaggttcattgcttgatcacatacaagaccacttttaagcaagtaccaggatatgttgttttaggtaccaagaagttaggtacagtgtaggaataattaggaggatttttaaatgagttttaacccaaatcaaggaagaaagtttgcagaagtattgaaagaaacttctagagttagtgaagcctctagtaaggaagcaccttctaaagaatcaagtaattacattaagagagaaaagagaagaccttacacctttagcttgagaccaagtgcaagaacaaagttaacagagatcgcaaaagaacatggatacagctcatcttctagctttttgaatgatgtgattttagaaggaaggttggaaatgaaataagaagattaagtagatgatattgatcatttaaatatatgtagcgtatatttaatgatatacgcgtggtgctagttaaatcgttctagacaataagccaaattataagctaaaattgcaatttccaaccggctttgaaagcctatcagactacgtgctcgattgttctcggcattgtaataggtcagaagcgaaaagtcgctttcaattgttctgcgaatagccatcaattgatgatcattgtgctttttagctcctgtcatatttttacgatatggtgtccaaagttcataacccatttgttttagctgttgatgcagttctttgcctaaatagccttcgtcgccaagaagatagtaattagatggatgggcattttccatcagttcaactgtctccttggcatcatgaactgatgcttttgttacgacataatcaagaatgtaaccgtcatcgctaacaatggcatgaactttgaaaccatagaagtaaattttcttggtggccttataaccaatgttggcataaccgcgaaaaattttagcacgatagttgcgaattggttggcaaacaggtaccggaaagctgtcaatgatcaagaaatgtccattcaggtcaacctttttattcatttcttgccgtatctgataaatcaattgcaatagctgacgtgaacgccgattaaaacgtgagtgtgataaacaattgaaacattcacagaatcttctttgtgattcaattcctgtcttagcttgccagataagtaaagccaaaatcagactgtccgtagttttaatttgatcaatatttcgccgatgagtaaactcagccggtgcatacaaacgataccagtgccgacaaattatcactaaatctttaaaactaacttgtaaatggtggctaaaacgcttaagcttaaggcagttcaatcagatcagactcttttctattattactatttacaagtcgagtctaacaagattggacttttttattaactaaaacgatttaactagcaccacgcgtaatgatatgtattattgtaaaaagccatcctagaaatcaagactcataggatggctttttattgtagttatgctgagataaagattctaacaataaaactgatttttactactttatcctttactaagtatatccactagtatatacttagtaaaggataagtaatttttggaggttttcttatggagattacattgcaaaaatggggtaattcccaaggtattagactttctaagtcactactcagagatcttggaattactactgaaaaagctacttttgaggtaaaagttaagaataaagaactaattttgaaaagaaaaaaagagagcaagctagcacaacgatttgagggctttgattatgaggcatattgggataaatgggataatgaacatcctggtgaatacaaagaagttgattggggcaagcctgtaggtaaagaaattaaatggtaagaaagtcacctaaaatatagaaaggggggtgaaaaaatgattgatgttcatcaaggtgacattatcattattggttttgatccaagtttaggacatgagcaacaaggaactagacctgctttaattgtatctaatcatgactttactaggttaactagatcacttgtgaaagtagtaccgattagtaaaacagaaaatgattttccgttacatattccagttcctgaaggtttaaaagtccatggagttgcagaagcacaacaggaaacaactttagacttagctgcacggcattggtacaaagtggatcatgcacctgcatcttttataaaagatgttataaatgctatttcagattcttatgaatttgaagaataaaaaagtcactagcgacaaaatctagtgacacaaaaacgaagcctatatactaacctgacaaaatttagtatataggtttttaattttattgtcaaaattatcaggtatccagaaaggtatccaacttcaaaattaattaaaatcaaccaacatcaaaatagcttattttcaatatataaaagcaactaacattaactagaatccaaaatatatcccacccggatcataaattatgcctgtaagcattggtcttacaggctttttacataccttaggtatctatgtgctaaattttactacaaagacaatatttttttacatttgatattgtatgatacaaatatatgacaattattaacttaatcttacattattagtgaatcagttgactaaagtttggaacgagcttattctaaaattgatttccaaaaaataggatcgacaagtgtgaacgacaactatttttaacattatcggaggaattaagattgactacaaccaaaaaaatcattgttagattggcatgcgcgactgttcttggtacggcaggggtagcgctgacacaagtaaatataccacaaactgcagttgtgaacgctgcaactacctctgttgcagcccgcgcacttggagttgatgttgctagttatcaaaacgctgacttgtcaagtcatgcgcaagctggagcacaatttgcaattgttaaagttagcgaaggtacttcctatcgtaaccctaaggcatcaagtcaaatttcaacggctttatcaaataatatgatgccaatggcatatcactttgctacttttagttcaaatgcaagtgctgctgctgcagaagcaaattatgcagttcaagctgcccaagcattcggcttacctaaaggttcatatattgcttgtgattatgaaacaggttcgggcaataacatttacggtggtaaaacgccaacggctaatgcaattattgcttttatggacactataaaaaatgcaggctataagccacttctttatgctagttcatcagttttacaaaataatattgatactaatagtgtaattgccaagtatcctaactcattgtgggtcgcttcatacgctatttcaggtagaattgatagtccaaacttcaattacttcccatcaatgaatggcgtttcaatttggcaatttactgataattggaagggattaagcgttgatggaaatattgctgttttaccattatcaattgacggtaatgtaacttccaacaatggcgcaatttcacaagctccagctaccagcaacaccaattctgctagctcttcaaatgcttcatcaaatacttcgaataagagtacttcatcagatgatgataagggttcagcaactgctggctatgtgatgaagaaatcatatatctataataaaaagggtgagcgtcaaagcggctactatgcagcttatactaatattactcattatggtgtagtgactcttgataatggtaagactgccttaaacatgggcaatggtcgttacattatggcaagtaatgttttaggtaattcacgtgtacttaagcacaatgcttatgtatataataacaagggaaaccgcgctaactggagagtgcttagaaaaggtacgccaattaagacctatggttcacggatgcgcgttaatggtaaaagctgttaccgaatcggacgtaacatgtacgttaaggcggctaacttttaattaaaaaattgaatttatcaagaaggaattaagcttaaaggtttaattccttttttcatgccgttttttgtataattaaaagtattcaggaaacgcctgaattaattaactgatagggatgaaataaacttgaaaaaaagatttatagcaataatattgatgctactgactttaacgggttgtactataaaaagtactacgcctaagaaggctaagtcgtcagttaaaacggttaaagtcgataaacagcaatctaaggaaaaacaggctaagtatcaagtgatagaccaagtttggcgaattcaacaagatggcgttgatatttatggtcatatatatctaccacagggtttagctggtaagaagaaagcagtaattttggctcacggattggcaggaaattaccgtgatctaaccagttatgctaaatatttagctagttgtggctatgttgcctatacttttgattttcctggtggagctaagaatggtcaaagtagtggtgtagatcaattaaagatgtcaatttttacagaagaaaagaatctacagctggtattaaatacaattaaaaataggactgatgttgaccgtaaacaagtgtctttgctaggcgagagtcaaggtggagcagttgccgcaatgctcgcaagtaaatatccgcaagaagtaaagtcattgattttgctttaccctgccttttcgatcactgattatgcgaaagcggcttttaaatcagaaaaacaagtgccagacaagctcaacctatttggcttcacaattggtaaggcctattttgaaaacttgttcaagtataacttgttaaaagaagcaactaagtatcatggtccagttttaataatgcatggtacaagtgacatgattattccagattcttattcaattatggctaataaaaaatttaagcactcgaaattatacttatttaagggtgcaggtcatgattttaaaggtaaatatcatagtcgagcagatactttaattgataaatttttgcagaaaaatgggaaataaataatgaagaagaaataccttggtttattggctttattaagcctattgagcgtttttgctatttggggtcaaagcgttagagctgatgttgattatgatattgataatgttagagccatagcaagagttaataaagatggttcactgacaatgtatcgaacaattaagtattcatttgatagtgatgctcgtggcctttattataagcaaaatctggctgtaaaacagaagttgagcaacattcaggttaaggtcgatggacaaaatataaaggccgcaacaacgggcaaaaataatacgtataaattgcaaaagcagggcaattcttataattttaaggtttatcatcgaattaaggaaaatgataaggttaaagttgagtattcttatctaattcaccgggcaattactaattatcttgatacagctgagctgaactttaaaatagttggtaatggttgggatactgacttagatcatgtgcgtgctgaagtgatttttcctggggcagttaaggggctaaaagcttgggctcatgggccactaagtggttacactcaggttttgccaaaagagggcaaaattattatgactgctgatgatgttgcaggagatagtggtgtcgaagtacatgcgatttttccaactacggtaactagtgctaatcagaatattgttaaagaaaataagaaaagagcaattgaaaaacaagaagcagcattagcaaaagaagctaatcagaagcgtcagcgtaagcagatgcttagtataggattgatgatcatttcagtacttgtcggttttgtggtgataattagaggcttttttattaaaaaagttggggttaagccaaaaatagagcgcgatttagtacataattatgaaattccagatatatcacctactgctgcgcaaattttggatgaagctgataaaccaaatgttaaagcatttacagcttatttgatgcaattagccggtaaaaataaaattaagatcgaaaaatatcaaactaaacatttaaagcggactaattatcgaattactttagtagatgatagtgttttgactgatgacctattagattttatttttaacaaagttggtgatggtaagtcatttacaacgaaagatttgcgggattatacttctaaaaaattgggtaggcgttttgataaatggtgtgacgggcaatataagcaagttgaggataaggacttgcttgataaaaaatataaaaagcagcgtagcaacttccgaacggggatgctcatgggaatgattgctagctttgcgatctgggtaattagcttaatgatggcaaataatatacccagttttgtgataataattggaatcatgatgatcgtcttagaagttgctgcattcatagtgggcaattctcgtttaagtatttatacccaaaaaggtgcacttgagacagatcaagttcgctgctttaagaaaatgctagacgatattggtcaattcaagatgaaagacgtcggtgatctgattttatgggaagacattatgccgtatgctgtagcgtttggtctatccaaaaaggtattgaagcagcttaagattgaatttgcagatgaattagatgctgcaccagttctgttttatagtggattctatagtagcagtagtgacagttttgagcatagttttgaacgtagcttctcttcaggcgtgtctactggtttatcttcagtttccggaagctcaggtggattttcaggtggatcgtctggcggctttggtggtggcagcggcggtggtgctttttagtgagaaatttttatactataattaaactaaaaaaggagggctaaattatgccatttgtacatattgaattaattaaaggtcgctcagatgagcagattactaacttaatgaaggatgttactgaagcagtgcacaagaatactggtgcgcctaaggaacacattcatgtaattatcaacgaattaggtaagcatacttatggccaaggcggcgagtggagagcttaataattagaaattgtagtaaaaggcgactcgattgtgagtcgcctttttatatagttaaatatataaacttgtattagagccttaaagctatgtgtgcataaatgaattatttatttagaatcccacgtaatataatgatgttgatgtctagatatttacgaggaggatttgaaatgaatttaaaaaagaaaattgcaatttctgcaactgcactgactgttgctctctctactgcatttccaattgctgctgcgcaaagtcagccggtaaaagcagtaggtattgtattggttcatcgtgttacagcaggtgaaaatttcgctaattggttcaattggcttagaactcgataaatagaaaaattaggaagcaggcaatataaagattgtctgctttttgcgtaaaaaaatttaatcactaaaacgatcaatcaattaacactacttcataaaaatcagtataattatgttcgttactattagtaagttatacaataaaagtggtgagaataatgtatgattatcgaaataatatcaaaataattttaaataaaactgaggctgatgataaaagtctcgaaaatagtttaagtgcgattaaagctatcctaaatatggccgaagataatacagctgaaaaatctgagactaaatcagtaactcaacctaagaataaaattgcaaatacacaatcaattgcacaaagaaatgcagatttaaagcaaattaagcaattattgattgggctgacagccttaattgagactccaggtgatgaaaaagctaaaaagagttcacttgatgctttacacaagttgacgtttgttccaggcgttggcaagcgctatggcaatgttttgggtaaattggatcaggcaattcaaaaatctaagacaactaaagaagctgttaacaagaaaatttttgaagaagcaatgaagcccaaagagcaacctaagcgcgattatcgtaaaggacgccgctatactgttattcgggctttatcaggctgtaatttgattaatgatagtggtcaaattgtttaccgtattaaagaatcacaaattcactctttgaatttaaagagcggtgacatagttgaagctattgaaaatcgagataatccaaattatgaagcagaagtcttgcgcgtggtgggttatcgcaaattgcgcatgcgtgattatgacccaatcgaagaattccggtatgctgtggtccgcggcaaggccaatcaattagctatcactagaaatattaagggcgaaaagttgagaattcgcggtaaggatatcacgattccggttgattcaagttattatcaaggtgaaaatattcatgttgaagatggttcaattgtagatctagcttggtatacgggtgatgttcgcattaagaaaaatcctgctgaggcagtacagattcgttggatttatcaagttgatccgcctaagaaatcagatctgtcgtatcaaaagaaaaataagtcaaagaaagaagaaacagaagagttaactaaactcgacatgaatttgcactatcagcgggtgggaattgcgattggtgataatcaaaatgaaggaatattagaagggattgtttcgcgctataatgggatcccaattccaatagatgcttttgaaggcaagaagaaggtaatggaacggcaaatcaaagacttagatattgtaatcttgatgacagcttatgctgctcatgatgctacttggaatattcaggaattcgcttcaaagtatggtgttaaatttgccgtttcttcatctaaaggctaccgctcttttgagcgagcattatatcgagctgaaaatggtttacctgcttatgaaggaacgcaatcaatcgattataaagaagttaaaaataaataatttgttaacattattttgtttgcttgagctaacagatgatttttcgttaaaatagtactaactaaaagaaaggacgcttaataatgaaaaacattaaacaacgttcctggatgagatggttggtatttttagcaggacttgaaataatcgcaatatcaatcaatcttttttatggaccgattaatattgcagctggtggctcaacgggtatttctattctagtcgatgcggtctgggggattaatcgatcaattacagtatttgtagtgaatggcttgatgctgattttggcggcaatctttttaggcaaaaagactacccaaaatattgcattaggtagtttgctcttaccagttttgatggaagttacgcctagctttaaagcagtgaataatgacctactagccgtaatttatggtggtgcattaatgggacttggagtttcgctactttatcgcgttaatgcctcaagtggtgggacaacaattccgccgatgattctgaagaaatatttttatttaaatcctgcaactacgcttttatgcattgatatggtaattattttcttgaacatttttgtcgatggttggaatgctttcttcttagcagcattttctcaagtggtaactgccattacgatgcgctacgcggagaccggttttgataaaaagtatcaagtcagaattatgagtaattcagatttagaccgaattcaagatatgcttaaagaagattatcaaggcctgacgatttatgatgttataggtggatatagcgacgaaagcaagcgtcaattattaatcgtagttgatccacgtgaatatgggccacttatttctaaagtacatgagatcgatcaggatgcgtttatcattaccgaaaatgttgcaaaagtgcatggcggtcaatggcgaatgtaaaaaaataattgatcttagtctaaaagcgttgtatgatataagagttgtatttgtggagacctccacatctgcaaccgcacggcttgaggttagaagtcttcttatgtaagaagcaccccagttcggcgagtctaagtatttttttcggaggtgtacaaatgtacgcaattattaagaccggtggtaagcaatacaaagttgcagaaggcgatagcgtatttgtagaaaagcttgatgctgaagaaggtagctcagtaacttttgacgaagttatccttgttgctaatggcgacgacgttaaggttggtactccattagtagatggtgctaaggtaactgctaaagttgaaaagcaaggcaaggaaaagaaagttgtaactttcaagtacaagcctaagaagcactcacacagcaagtatggtcaccgtcaaccttacactaaggttacagttgaaaagattgaagcttaattcagaggtgaaatgaatatgaacattttaggtatgaaattatacgctcaccacaagggtggtggttctactgccaacggtcgtaactcagctggtcgtcgtttaggcgccaaggctggtgacggtcaaactatccacgcaggtactattatttaccgtcaacgtggtactaaggttcacccaggcaagaacgtaggtcaaggtggagacgacactttatttgcacttgttaacggcgttgttaaatttgaacgtcttggcaagtacaagaagcaagtttctgtatacccagctgaagaagctaagtaattcagagattaacatgaaaaggcgagtagcataagccacccgtctttttttatggctttttccgcccagaaacatgtataattaaaccaatatcatacaaaaagagggtctctgagatggaaaataggcaagaattattatccttaattaaccagcgaattgagcatgtaactgatttaattaaagaagcaaatgcagatgcattgattatttttaatcaagctaattatcgatatctaaccaattttacaggggaagaagcacaattaattttgactgctagtggcgaacgagtacttttatcagattctcgttttgctggacagattaaagcacaagcacctggcgaaatggatgttgtaatgaaacattctagtgattatgaagaacttactaaggccttgaaaaaaatggacgtcaagagggtcttagttgaaggtgaattcgtttcagcgagtgaatatgaaaaacttaagcaactaaatccagaacttgaatttgtgatggttgaagaattggttgaacgagtacgtaatattaaagatgatcttgaaattgcggcattgcgcaaagcaattgatatttcaatggaaagctttaaaggtattttgccgatgattaagcctggcgttaaagaacgtgcaattggtgctaaattggactacctatttaaagttaatggcggcgatggccctgatttcgatacaattgtagcttccggtgtgcgttcggcttgggctcatggcgttgctagtgacaaagaattgtccgaaggcgatatgattgtcattgactttggtagtttttatcacggttatgcggcagatattactagaactgtttcattaggtgaagttgatgctgaaatgcataaaatctatgatattgtacatgaagcacaacgccgtggcattgccgcggcagttgcaggtaatactggatatgatgttgataaagcagcacgtgattatattacagaacaaggttacggtcagtattttggacacgggatcggtcacggcattggtcttgaaattcacgaattgtgtcaaccagctttaccttttagaactactaaattggtcaataatatggttcataccgtagaaccaggaatctacttgccagacaagggcggtgttagaatcgaagacgatattttggtccatgatcaaacgcctgaaactttatccactttgccaaaggatgaattgatttccctataatagctatttaatttatcgtatttatggtaaaaacgcttcaagattggtaagataataattgtagaaatgagggacttaatatgacaatgatttcagtaaacgaattcaagaatggcttgactattcaatacaacaacgatttatggcgcattgttgaattccaacacgtaaaaccaggtaagggtagtgcctttgtacgttcaaagcttaagagtttgagaactggtgctgtacaagaatatactttccgttcaactgctaaggttgaaactgcagacattcaaactaagtcaatgcaatacttgtacaatgatggctcaagttatgtattcatggatacttctacttacgatcaattagcaattccaaatgaacaaattggcgatgaagctaattacttattggaaaacatgattgttaacgtagttatgcacgaaggtgaaactttaggtatccaattgcctaatacggttgatttgaaggttgctaagactgaacctaacatcaagggtgatacttcatcaggtggtggtaagccagctactatggaaactggtttagtagttaacgtaccattcttcattaacgaaggtgacgttttaactattaacactgctgatggtacttacgtatcacgtgcaaataagtagtttatttgaggtaacaaaatggcagatagttcaaaaattcttttaagtggtgaagaaaacagcgagcaaattaaaattgatccaagtgttctagaagttattttgggtattgctgcagaaaaagttgatggtgttgccggaatgcgcggcagtttgaaatcaggcttaaactgggttttcggtcgtgaagatcatggtaagggcgtaaatattagtgttgatgacgataataagctaattgctgatatttatgtttatcttgaaagcggcgttaacgttcctaaggttgcaatgacgttgcaaaagaagttgaaggcacaattattgcaaatgactgatcttgagctgaaggcaatcaacgttcatgttgtcggtttagttttcccagaagatgaaaatactgaccagactacatcagagctgtttccggaggacgaagaagaaaaataatgaaccaacacgaaagtcgaaaagttgctatgcaagccgtttatttggctaatcaggagccagatttaactgccgaagaagttgaagcaaaagtcgttgcaacgcttaatttaaaacagctttctgcctattctaagaagttaatcgaaggcgtactagaagatcgcaaaaatttacagtctgaactaactagtcatttgaaaaagggctggcgtcttgaacgtgtgagtcaaactgtggtagccatcatggaagttgctttatttgaaatcaagcatagcgatgaaattgatgctaaggcagcagttaacgaagctttaaatttatgtgacgaatttgctgagcctaaagaaaagccatttattaatggaatgttagcaaactttgttaaatagcgatgaatagccggcagttttgccagttatttttttacaaaaggagaacgggctttatgggaaagattcttgatggtaaagcatttgcaaatgaattagggcaaaatcttaaagaaaaagttaagaaattaaaagaagagggaataacgccacatttttgcgtaataaatattggggatgatcctgctagcaagatttatgttcgaacaaaaaagcggcgggctgaaaagatgggaattatccaagatatttatcaaatgcccgctgatactaaacaggaagaagttttagcattaattgataagctaaatgctgatcctgagattaacggcttgatggtacagttgccagcacctgaacagattgatgcagatgccttgttaaaaaggattgaccctaataaggatgtcgacgccttaacgcctgcgaatattggtcaactttggatggaaaatcactttgttgaaccggctactgcagaaggcattattgctttattgaaacattatcaaattacgctggctggtaagagagttgtagttattggtcgaagcaatatcgtaggcaaaccagtagcggcattaatgttagaggaaaatgctactgttactgtttgccatttgtatactaaaaatctggctgaaattacacgacaagccgatatagtagtttcagcaacaggacaagcatttttggtaactgcagatatggttaaagatggggcagtggtcgttgatgtgggcatgaatcatgttaatggcaaattagtcggagacgttgactttgataatgttaaagaaaaagccagctatattactccggttcctggcggtgtaggtcctcttacagtacaattcttaatggaagcagttgttaaattgactaggagacaaaatggccgagaataaatatttaacggttactgatttaaattattatattacgcaaaaatttaagaatgatccttacctgcataaggtcttcttacaaggtgaattgtccaacttccgttatcggcgtaattcgcaccagtatttttcactaaaagatgaaaaatctaaaattaatgtggtgatgttccgttccttctttgataaggtgaaatttaaaccagaagaaggaatgaaggtttatgtggttgggtatgtcagcgtgtatggcccacagggctcgtatcagttttatgctgaacaaatggaaccggcaggattaggtgccttatatgagcaattgaagcagttgcaggccaaattagccaaagaaggtctgtttgatccagagcataagaagaagttgcctcattttcctgatcgaattgcagtagttactagtgcttctggggcagttattcacgatattatggttacagctaatcggcgtttcccgcatgctgagattgatttgtatcctgcgcaagtccagggtgatactgcagcggattcattagtgagagcaatgcgccagattgccgctcaaggcgacaagtatgatgtcatgatcatcggtcgtggtggtggctcactagaagatttgtggccattcaatgaagaagaggttgtgcggcaagtttacgcaatgcagatgccagtaatttcttcagttggtcatgaaacggatactaccttgtgtgatttggtggccgatgcgcgtgcagcaacaccaactgctgcagcagaatatgctacgcctaatacattggacgaaattgcgcatattaagcaattaaccagccagttggtagctagcatgcaaaatattattcgttcgaaacgtgagcgcttaagtcgggtgcagaattctgtcatcctgcgcgagccgactagactgtatgatcagcagattcaacaagttgatcaattaaaacaaaggctgcaaaatagtatgcaaaatcggttgacccattctgtccaaggttatcaactgttgaagcagcgtttgtttagcgttagtccagataagagaatcggccagatgcagcaacaagagcattttttacagcaacgactgattgataatatgcagcactatttgaaaaataaacgcaatagttttacccaagtaatgcagcagttggatgactatagccctttgaagacgctagagcgaggttttgtttattcaactgatgaacaagggaaaaccattagttctgtgaaacaagttcaaaaggatgatcatttgcgattgcattttaaagatggacaagttgaagcagtggttacaaaggtaaaggaagaacaaaatggcagtgaagaaaaataattttgaagaacaattaactaatttggaacaaatcgtgcaaaatttggaaaacggaaatgttccgttggaagatgccctaaaagaatttcaggagggcgtaaagattagccgtgatttagaaaagaagcttaacagtgctgaagaaactgtggctaagttgattgatagtgatggcacagaacacaaattagatccaaataacgcatcagcaccagaggaataaatatgacagcatttacttattttaaagatgaatggaccccagtaattgatgattatctggctaagcatttggctagtgaggttgaagatcaaaagatcagtcagattatggcctactcagtgatgggtggcggcaagcgcttgcgtccgttattgtttttagctacgttaaatgctttaggcagaaagattgaagaacctgaaattaggattgcctgcgggattgaactgattcacacttattccttgattcatgatgacctgcctgccatggataacgatgactatcggcgcggtaagctgactagccacaaaaaatggggcgaggctgaggcaattttagctggggatgcgctcttgccgatgggaattcaatggattgcggaaggcagtaagtcggcgaaattggtagatttaattaccaaagcagttggccctaatgggatggttggcggtcaatatttggatattgattcaactaacaatgctagtgttgcgggtgatgccaagtttatcaataagatggaatggctgaagaccggttgcttaattcaggctagcgttgagatggctgcagtttatgcaggagctagtgatattgaacaggtaaaattagtcgattttgccaaaatttttggtcgttcataccaaatctatgacgacttggttgatgtcgttgaaactagtgcagaagctggtaaagctacgcacaaggatgaagctgaaggaaagaataatactttaactttgttaggaattgatcaaagtcgcaaagaactaactgacttaattaagcaagcacaagatgatttgcatggactaaatggcgaagtgctaactggctttttagatctttatcaaaaggtgttataaatggcaaaacaaagagcagatattttattagcagaacaaggaatttttcattctcgttcagctgcccaaagagcgattatggcggggctggtttctgatcacaatcatcaacgaattgataagagcgggactaagtttcctgaaggggaaaagttttacgtgaaagatgatggtaagaaatatgtttcgcgtggcggctttaaactggaaaaagctcttaaggtctttgacattgatttaacaaataaaatttgtttagatattggtgcatcaactggcggttttactgatgttgctttacaaaacggtgctcagatggtctatgccttggatgttggctacaaccagttagcttggcaattgcgggacgacccgcgtgtagtggtgatggaaaagcagaatttccgctattcgaagccggaagattttgatcaaggactgccagattttgcaatgaccgatgtgtcctttatctcgttagatttgatcatggcaccgatgtatgcaattttgaagaatcaatgtgatgccgtttgtttgattaaaccacaatttgaagctggccctgagaatgtcggtaaacacggtattgttcatgatcatgaagtgcacaaggcggtaatcgagcacaccatgcaaaaggcattggagatcggcttcaatgttttaggcgttgattattcaccaattaaaggtggcaaaggcaatattgaattcttgattcatttacaaaaagacgaagcaaatggtggccgcaacttatggcaagggagcccagctgaagtggttgagcgcgccgtaagtggtctataggagtgaagctatgctagttgagctagatatcaaaaactttgcaattattaaaagcttaaaggttcgttttcaagaaaaaatgacggtaatcatcggtgaaactggtgctggtaagtcaattattattgatgctgtttcattactgatgggtggtcgcggtcaaaaagaaatgattcgttcgggtgagtccaaggcgattattactggcttgtttgaattggatgatcaaaaagaaaagatcgcggaattgtgtgatcaatatggtttgccgcacgatgacgatcagctggtgattagtcgtgaattagctgtcaagggcagaaatgtagtccggattaacgggcaattgacgacgattaatgttttgcgcgagattggtagctatttggttgatattcacggccagcatgatcagcaaattttgatggatcaggaccggcagattgacctagttgataattatgcccctgcttcttttaaggcagatttagccacttatcaaactgattatgctcaatggcaaaagctaaccagtcaattgctgcacctgcgtcaagatgcccaagaattagctcagaagcaagatattctgcagtttcagaataatgaattggaagcagccgaccttgaggatccacaagaagatgagaaacttgaggaagaatataacgaactaaataattatcaaaaaattgcggatacggcgaattacttcatgcaattgtatgatgacgatgagcatggaattgcaactttacttggagatgcgcaaaatgctgcgactgatttaactgaatttggttcaaaatttaaggattttgctaagacagttgatgatggagtttatgctttaaatgacgcccgcagtgaattatcgaacttaatggatgcaatggacttcgatgaggaacgttttcaatacgtgactaaccgcttggataccttgaattcattgaaaaagaagtatggcccaaccttggctgatgtgtttgctttttatcaaaaagtacaaaaagaactcagtcaatttgaaacaggcggccttgatgaggaaaaattgcaagcagaagttgccaagattgaagaaagaatgacccaagaagctagagatctgcatttaatacgcgaaaaagtggctcattctctggaagagcagattaagcaagagttagctgatctctacatggaaaaagctcgcttttctattaattttgatgaaacaaagacatttaccgataagggaactgatgcgattgttttcttaattgcacctaatccaggtgaagatttaatgccattagttaaaattgtttctggtggtgaacaatcaagattgatcttagctttgaaggcaatcttcagccgagttgaaccagtgggtaccatgatttttgacgaaattgatacgggagtttctggccgagtatcggctgctatcgggaaaaagatgcactcaatcggtcgcaacaagcaggtaattgcaattacgcactcaccacaagtggctgccgcgggtgatcaacgctacttggtagctaagcaagtaaaagatggttcaacctttactcaaataggcccacttagcaaggaagaaaccattacagcgattgcacagatgatggctggacaagatgtaaccgatgcagcaaagaagaatgctgcagatttgattaagagtattaaagatgactagtattagtaaattttggcgtgatttttgtgtagaacatcaagtaagtcctacagcattagaaggtgcttttgcttttggagctaatagccgggatgcagatattcttagtgatttggtcaaaagtggaattaagacggcaacgactagcctgtattctgcgcaagaagatgtaccggttgtagggatgtacgcaattgttttaaatggacgaaatgaaccagtttgtgtgattcaaaataagactgttgagattatgccatttaaaaatgtctcagctgagcatgcctatttagaaggcgagggcgatcgctcatatgaatcttggcgtaaagtacacgagaaattttttgcgcgcgaatgtcaagaactgggacgagagttcacagatgaaactgaagtagtgtgtgagacattcgagaaaataatttagtaaaggagcagacgattttgtctgtttttttgtatgcaaagagaaaacttgaaaaagaaacaattttagtgcaaactagatatattacaagttaagaggagttcagcatggcagataaaggtttattacttgtgctttctggtccttccggcgttggtaaaggaactgttaaaagcgcgattgttgaaaacaaagtctttccatttgaatattcagtttcaatgactacgcgtcaaccgcgaccaggtgaggttaatggccaagattatttttttgttagtgaagatcgctttcaagaggctattaaaaatggtgagttgttagaatataataaatatgtcggtcactattatggtacacctcttgcaccagtgaagaagatgcttcatgatggcaaagatgttttacttgagattgatgttaatggggcacaaaaagtacgtgaaaagatgcccgatggcgtgtttatctttttaaccccaccagatctacatacgttacatttgcgtttggaacaccgtggcaccgagtcagaagatgtaattcgtggtcgaattaagcaagcgcgcaatgaaattttggagatggaagactatgattatgcagtagttaatgatacagtagctaatgcagttgatcatattaaagcgatcgtcgatgcagaacatgtcagtgttaaacgtgtaattgatgactatcgtaagatggtcaaggaggattaattattatgagaattacttacccatcaattgataaattattgtcacgtgttgattcacgctattcattatctgttcttgccgctaagagagcacatgaacttgaagctggtgatccaccaactttggaacattttaagtgtgataaggctgttggtaaggcacttgaagaaattgctgctggtaaagttactgttgacccagctcatgccgaggttaacctcgaagattaatttattgaccttcatcctttggggtgaaggtcttttttacaggtgattaaatgattgctcaggttattgttgatgtagctgcacggcaaacagaccgtatttttgaatatcatattccaacagaattagaaaaggatattgcgattggatcaagagtagttgttccgtttggtcctcgtaaagtgcaaggttttgtggtggggatcactgatcaaagtgaatttaaaggtaaacttaaggatttgctagttgtggtagatgagatgccaccgcttacgccagagttggtaaagttatctgctgatttagcaaaaaatattttttcttaccgaattaaaattttacaagcgatgctaccttgggtaatgcgagcaaattatcgcaaattgctagtgccagctaatgatagagctgccaaaatgccgctgtttcagggtgatccaattgatttaaataaaattacggatctggcggagattaagcaattccgcaaattattgcaagatgatcaagcaaagattgagtatgtggtagaaaatcgagccaagaagaaaaaagaaaatcaatatgaactagcattaaaaaaagaggaatatcccaaaatttacaatactttacgtcaaaatgcggtaaagcaaaaaaagttattgatggatatcattgataatgcagcggattatcccaaaagccaaagccagctagaaaaacagcttggattgacggcggcgagtttgaattctgcgattaccaaaggttggttgaataaaaaaagtgttgaggtttatcgcgatccgttatccggatttgatgacggagaacataaaacagcggttaccttaaatggtgagcagcaaggtgctttgaaccagatcacccaagcaattgaacagcgccaggctgagacttttttgttggaagggattactggtagcgggaagactgaagtgtatttacacgctattagcaaggctcttaaacaggggcgaaatgcattaatgctggtgccagaaatttccttgacgccgcaaatggttcgtcaggttaaggcacgttttggtcaagaggtagccgttttacatagtgccctatctgagggagaaaaatatgatgagtggcgccgaattcgtcgtggcgagactaaggtggtcgttggcgctcggagtgcagtttttgctccactagataatattggtttaatcgtgatcgatgaggaacatgagtcttcatataagcaagaaaccgatccacgttataatgcacgtgatgtggctatttggcgtagtaaatttcataattgtccgttggttttaggaagtgcaacaccatcgttgagtagccgtgcacgcgcccaaaaaaatgtctatcatcttttacggttaactgaaagggctaatcaaaagaaattgcctaaagttaatttgattgatctaaagcacgtgcagtttgctggtggtcaatttgatttatctgttgagctagtagatgcaataaaaaagcgtttggcaaaaaaagagcaggttattttaatgctcaatcgacgtggttttgctaattttatgctttgccgtgaatgtggttttgtattaaaatgtcctaattgtgatgtttctttaaatttgcataaggatactaacagtatgcaatgtcactattgtggtcatactgagccagtacccacacgttgtcctaattgccaaagctcgcaaattcgttttttaggtgcaggtacacagaaggtacaagaagaattagaagagcttctgcctggtgcacgaatcttgcggatggacgttgatacaactagaagaaagggtagctataagaaaattctagatgcctttggtgctcatgaagctgatattttgttaggtacgcaaatgattgctaaaggattagatttccctaatgtaactttagttggagtaatcaatgccgatacaggattatggctttctgactataatgcttctgaaaagacttttgaattattaactcaagtagctggccgtgcaggtcgtgctgataaggaaggggaagtcttaattcaaacttataatccagagcattatgctattcaactagctcaaactcaggactacgaacgattttatggctatgagatgaatatgcggcatgctggtaactatccaccatatttttataccgtgctgatttccattgctgctaaaaaagaacagaatgcagctcgtgaggcttttaggattaagaggtatttgaatgagcacttgcatgagccaacgattattttgggaccaacgccaagtgcaatttctcgtgtaaaaaataaatattattatcaaatactggtaaaatataaaaaagaaccaaatttaaatgaattattacaccatgttcaagattccgcgcaggaagctaagaaatatggtttaagtatttttattgataatgaaccagagagaattatgtaaggggatgctttaatgacatcaataatatttatgggaacaccgaaattttcagttccagtacttgaagggttaattgatgaaggctatgagattaaagccgtggtcactcaacctgataaaaaggtaggacgtaagcagaaaattactaagtcaccagccaagatcgcagcagaaaagcatgatttgccaatctttcaaccggttaagttgtctggatcagacgaaatgcagaaattaattgatatgcatgcagatttgattgtaactgcagcatatgggcaatttttaccaactaagtttttgaattcggttaaaattgcggcagttaatgttcacggctcacttttgcctaaataccgtggcggtgcaccaattcaatattcactaattaacggtgataaagaaactggaattaccattatggaaatggttaagaagatggatgctggtgatatttatgctcaagaagcaattaagattgagcctgatgataacgctggcactttatttagtaaattatcaattgttgggcgggacttattgcttaagactttaccagcaattattgatggctcaattaaaaaggttccacaggatccagaaaaggtcgtcttttcacctaacatcactaaagaacaagaaaagcttaatgttgatatgacagcagaagaggccaacgatatgattcgtgctttgaatccagatcctggtgcttatttgatgattgaaggcaaacgtttcaagatctggaaggcagaaattgcatctgattcatcaagtttaaatgccggctctgttgttgctaacaaaggacgttttgccattagttttgctgataattcagtacttaacttacttgaagttcaaccaagtggcaaaaagagaatggacatcaagagctttttaaatggtcaaggtagtaagtttgtcccaggtgaagaaattgtcgatcgataagagtgcacgtgcagtcagcttagagacattgatcaaggtcttagatcaaggctcctattctaatattagtttgaataacagcttaaagcactctaacttgtcaattgcagaccaaaatttagctactaatattgtttatggcacgattcagtatcgattgtttttagaatatcagttaaaaggcttagttaggacaaaactgaccgaaaaatatattaagccattattgttaatgtcactttaccagttgatttttttggataaagtgcctgatcgtgctgtacttgatgaggctaataaacttgctaagcaatatggcaagcgacattcagctggctttcggttggtaaatgggattttgcgttcgtttactaggcgcggggtgattttaccagctgaaaataatccagttaaatatttaagtgtcaaagagagcgtacctgaatggttagttcaatatttaattgataactggggcctagacaaggcaaaatcagttttaaacagtattaatgagccagctaaaaacagtgtacgtatttcaaagttggcagataaagagcaagtttttgcccagttagagcgggataactatcaaccacaatggtctaagttatcaagcgatgatgtgattttgagtcacggtggcattagcgaaagtgatttgtttgaagaaggcaagttaacaattcaagatgaagctgccagtttagtcgtagaagcttttgactttgaacaagatgagcatgtgcttgatgcttgttctgctcccggtgggaaaaccgtgcaaattgccgaaagcattgttaatggtgatgtgactgccttagatattcatgataaaaaattacgtttagtacgagataatgcccagagaatgcacgttgcaaataaggtaaagactaaggcatgtgatgcacgtaaggctacagagatttttgcggcaggtgaatttacaaaaattttagtcgatgccccttgttctgggcttggattattgcgtcgtaagcctgaaattcgctatactaagagacaacaggacttacaaaatttacaaaaaattcaattggcaatcttaactgcagtaagttcactcttaaaaaagaatggcgagttggtttattcaacttgctcaatttcaatggaagaaaatgaagaggtagttaagaagtttttgcaagcacatcctgactttgaactagttccatttaagttaactaaacttgaatcaaagacagggatgttgaaaataatgcctgatctagatggcaatgatggatttttcattgctaaatttaagttacgaggttagatttttgattgaaacagcatacgcttcgagtattggtaaggtacggaaaagcaatcaagattttgtaaaagtttttaaaaatcaaaagggaattgtcttagcaattgtctgtgatggtatgggcggccatcaaggtggtgacgttgcttcaacaatggcagtcacccatttaggacataattttagtatgactgactttgcagatgctaatctcgctcataaatggcttgatgtgcaattaaattctgaaaatgaaacaattttaaagactgctgataagtttcctgacttaaatggaatggggacaacgattgtattggcgtttgcatttgataaaaatgccttaattgctcatttaggtgattctcgggcttatagttattctgaaggtaaatttgtccaattaactgaagatcattctttggttaacgaattagttaagatgggtcagattactaaagaacaagctaaacaccatccccagaaaaatattattacgcaagcattaggcgtctcaagtacgattgatcctgaatttgatgagatcaagatgggggaaaacgacattattttgctctgtactgatggcctaaccaattcacttagcgatccacaaatccaacaaattttggcaactaaggagcttagcttaagagaacgttgtaataaattgattagtgaggccaatcgattaggtggtggtgataatattactgtctgcttaatttggaacaaggaggacgagagcagtgatcgataaaggttatctgcttggggaacgttaccgcatcatcgataccttaggtgaaggcggaatggccaatgtctatctagcggaagatattatcctgcaacgtaaggtggcagttaaaattttacgccttgatttgcagaatgaaccgcaaacccaagctcgttttcaaagagaggcattagctacaagtgaattaagtcatcctaatattgtttctgtacttgatgtaggtaccgatcatggtttgccatacatggtaatggagtatgttgatggtcctaatctaaaagaatatattcaaaaaaattcacctttggatttaaatgaaattattcgaattatggatcagatattgagtgcagttgcattagctcataagcacaatgttattcatcgtgatctaaaaccacagaatattttgatggataagcgcggcaatattaaaatagctgatttcggaattgccgttgctttgaatcaaagctcgattacacaaactaattcagtaatgggttcagttcattatatgtctcctgagcaaacgcgtggcggaatggttactaaacaatctgacatctattccttgggaataattttatatgaattgatcacaggaactgttccgtttaacggtgatacaccagtggcaattgcactgaagcatgcgcaagaaccaattccttcaattcgcaagaaagattcaagtgtaccacaggcgctggaaaatgttgttttaaaggcaaccgcgaaagatccacgagatagatatgctacagctcaggaaatgaaagcagatttggatagtagcttggatcctgaacgggcagatgaaccggtttttgtaccatatcatggtaataacgatgataaaacaattgtattgcctggatttaagccacaaaaggaagaaaaagaagtggtggagccagcaaaaaccgaatcagtagaatcaagcaagctagtaaagaaaaagacttttttacagaatgtcaaaagtcacaaatggtggtggctgatctcaattattgccgcgggtttaatcatttttatgatgattttcgctttaagtggtactggaaataaacgacaggatgttaatattcctgatgtaactaatattgcagaaaaagcagctgagagtaaacttgaagcagcaggcttacaggttggaaaaattattaggcgacaatcagatgatataaaaaaaggccgggttattgcgacaaaaccaactgcaggcaatagtctagagcggggaaagagcgttgatttaattgtttccagcggttctagcatggttaaagttcctgatatggttgggaagaactatgccgaagcggcagaaaaattagaaaatatgggctttaatgtagttagagaggaccaatattctaataaagttgacgaaaatcaagttatttctcaaagcattgctgcaggtgtagaggttaagccgacgcagactacaattacgttgatagtttcacgtggcaagcaggctagatcacattcaaatatggttaccttgaaagacttaagtaattattctttgaagagtgctcaagactatgccaaagaacatggcctgactttacaaatcaatcaagaatattctgatgatgttgagaagggcttagtaatttcgatggagccaggtccgggtactaaggttgagcgtggttcaactgttaccatcaagatctcgaaaggtccaaaggaagacaaggaaactactgtaactaagacctttaccgttaactatgttggtgatgatctttctaagagtgagaagcctgataatgataaaggaagcaataactctgagtcagaatccgttaatggcaagggtgatcatgtccagatctatattaaggatgatgatcattccttgaacaatatttatcgtgacttgtatattaagcatgatatgagtttctcgattccatttaacattagagaaggtagtggacaattaaaggttgttcgcaatggcgatacagttttgaatgaaaaggtgactaaataaatgaaactagcgcaaggaaccgtcgttggtttgattgctggttattatgatgtagaaaccgctgcgggtatcgtgagaacgcgtgctcgcggcgtttttcgtcaaaaaaagcaaaaaccggcagttggcgatcatgtggaaattcagatagatgataaaggaatgagctatctggtgaaaatcttgccgcggattaatcgaattgggcgaccagcagttgctaatgtaagtcatgttttgttagtaatttctgcagtagaaccggatttttctgtagagctgttagatcgttttttgactttcttttcttggcaaaaagttggtgtaacaatttacttgtctaaagcagatttgctatcagaagcaaagttaaacacaatcaagcaagctttagcatattatcaaaaaataggttatcttgttttcactgattatcatgaaatgcaaattcagattcctaaaatgatcgaaaaaaatcaaatttggactttagcaggacagtcaggtgctggtaagtcaactttgcttaaccatttaaaaaaagatgctaatcaagcgactggtgcgatatcaactagcttgaatcgtgggaaacatactactagaaaggtcgaactttttaagttaggcgcgggctttttagcagatacgccaggtttttcgtcaattgatttgacaccaatcaagttgaatgagttatgtaattactttgttgagtttaaaaaggcaagtattcactgtaagttccgcggatgtcagcatttgcaggagccaggctgtgaagtaaagaagttacttgaagccagagaaattctggaaagtagatatgaggattatttggctatgcggactgagattagcgaaggtcgcataccggaatatttaaaatagaggtaatagctgatgatgattgcaccctcaattttgaacgcaaataatattgatcttaaaaatgatattgaaaatgcagtccaggccggaattagccgttttcatattgatattatggatggacattttgtgcctaatttatcttttggaccgcaactaatcaaagatttcaagcgtgaatttccgatgacagatgctgaaattcacttaatgagtgatgccccagataagttggtaccagcttttgttagtgcaggagcagatttggtcgaactacactatgaagcaatggacaagcctaagttatattattggttcgattatttagcttctaatggcgttgatgctgctttggcaattagtccagatacaccagttgaagtggttgaaccgtatttgccattactgaaacaagtattagtaatgacggtcaagccgggatttggtggacagagttttcttcctgaatcagttaatcgaattaagtcagttagagagattgtcggctctgattttgatattgaggtcgacggcggtattaatgatcagactattaaattagctgaaaatgctggcgctaatatatttgttgttggttcatacttgtatgaaaatggtgatgttggcagtcaagtacataaattagaaaagattattaagtaatgaaagcatatgcattgttgggcggtccaactgaattgtggcctgaagatattgaagaaaagctggctcaagctgatttagttattggggttgatcgtggtgccttgtttttagaagaactgggaataatacctgatgtggcagtaggtgactttgattctttacacgaaaatgacttaagccaaatagaaagtaatgttcaagacattcgttattctaatcctgtcaaggattggactgattctgagctaatgttgcagattgcttttgaagattatcatgtggatgaattagtgatttttggtgctacaggtggaagattggatcattttttgatcaatctattaatgttgctaaatcctgaaatgagattatatgcgaaaaaagtaacgttgattgaccaacaaaatctaatttgcttttttaatgcaggcacgcatgttgttcaaaaaagaaaaaattattcttatattggttttgcagctttaaaagcaatcgaagattttaatattattggtgcaagatatgagttgaagcactattctgggaactatcctcgtgttttttcatcaaatgaatttttgcctaatagtaatgaattcaggattagcttgcaaaatggtatgattgcagcaatttattctaaagatattaatcgttttcatgatttataggttaaaatagaactatagaaaagaaacaagggaattcaaatgaaatatattgactttgaaaaagatattgctggtttcgaaaacggtcgctacgaagcaagacttgaccgtgcaaaataaaatgtagaagactacatgtacaagaaccacgttcacatttttgataaaaagaagaagaaggaagtagctactatcaatggcttagctagaaatgtaacttatcaagatttggacttgccaactaaggtgggtgaaatgattactgagtatgcatacacgccaattgatgaaagaatggccgacgaaattcctgatgacgataagcatcacaatattatgaagtaaagtaaaacggtaagaagacaaaataaaatggtcttcttaccgttttttatataaatcattaaaataagtaaaaaaataagcttgcaagatcagtgatctaacaagctcttggtctattaggcacgagtaactttaccagactttaaagccttggttgaattaaaatataggtttttagaaatatttataagctttaaatcgttgatattataggatttaatgttttgcaatatcatagaatttttcacggtgttgcacaaatgttgcacaaacttgattgagtgaattaataattttggcatcttgttgatccttatattcatcaagtaagtgagcatagattgataaagtgattgctatattagcatgtcctaagcgtttactgatagcagctatatcaattccttgagaaattaagtatgaaacatgggtatgccttaaactatggaagtgaaaatcaggtttgttaagtccaatttccttaatggcttttcttaagaattgatttacagcagaactagaaggtggtaatccagttctaggaatagcaaaaataaattcagaattattaatttttaattgtttcaatttatctaataagaaagaattaactttaatctttcgaactgaactttcggttttagttggtcctagtatttttaaattaggattccaggttttattaatatcaataattttattcttaaaatcaatatcagtccattttaaagctgttagttctccaagtcgtgcgcctgtaaataaccccgctagaactaaatatttgctagtataacgaggagttaaatttgttaagcataattgtaccagcttattcatttctccttcattaaggtattctatggctctgacattgtcttgatttcctgtgatggttgtgcgattggtaaaattcttaacgattaaaccatcctctattgcatttcctgcacaagctttaaccataatattggttttacgaactgtagcaggagcatggtttttaccaagccaatttaagaagctttgatatttagctcttgaaatatcttttatttttgttgatccaaaatatttttcaagataatgataattggtaatatatctcttttgcgttgattttctgataatcgggaatttaaaagtaagataccagtgttcaaaatagtcagcgaacacagggttcttaactacatctacaccatcaatagaagcggcttccattttaattccgtactgttgtgcttcagacttggttttgaaaccgccttttgatttttgttttaaaatagaaacattcttttgtttttctggatcccattgagtttctctctttgaaaatcttacataccaggttttgccacgttttcttattgatgccattttatttttactcctatttttgctaaaatagggtagacgaaataagccgattccagtcggtttatcgttactctattacattataagtattattaagtttattgagttgcgctcacttactgttccagcagtaggtgggcttttttgttttatagattaattccacttatagttatcataaacatcaaatgtggaacgtcccatttcattattgtcatcgtcaaatatttgtgcccataaacgattgccaactttagacttactaattaagccataatgataagcatcccatgtagcttctttgttaataccacgcatgcaagtagtcttatccttgtcagataaattaacaaaacgatcattaacttccacagataagttagctttggaattaacagtaactttgcttacatattttgaccaattagtatctggatcatttttagaacggaaagccttaatgtttttaacaattaaagcattagtttggttagctttctgctttttaattgcattgctttttttagccttttgactttcaattctttcttgtctctcaatatttgcggtgctttgctcattagaatgtcttatccataagaaccctcccactaaaaccgcaattattataataaatcctattgcacaaccaacagaaccatctttattgtcttcttttttatcagtcatttgttttggctccttatttctttcaggtttaacgtcactgtggacgttttaaaacacaacagggttatgcagactttgaatacaatagcttcgacaaatatccatttttatcgtgttattatttctaaatgctaatgtatattccaaagcagcattaattgacattccaatagtataatgcaaaaagtttttaagtctgttatgtaatgctgctgagctcattccataaatgtctttcatttgattaaatgatttattcataatttctttttttaatgaatcttctggaacataaacatttgaagcaattatattagcttctgtttcaatgggctgaagctcttcaggataaggatttccttggctcttttgcgcatttattaaagcaacagaacttttatatgtggggtcgtctaatgcttgataagcatgtgaaagctcatgaataatagtaaatattattcttccccaagtattaatacttgcatttaaaaacataattggtccactagcgggaaaaagggtaaagccgcagactctatttgcaaaagtagtacttacttcatcaatagattgcgctgtaaatgaaatatttctagcagttaatccataattaaaatcatttaaagcattttgaccattattttcaaaagggaaaattaaattaggtgtataagcacatatatcgcatgtcccgattatcgaataaagatagttaataaccattggataccttacctctgatttaggtacattgtattttaaagcagtatcttcaactatagaattagcaatatcattgctactttcatatgaatcttctggtattaatctatattcgtatccaggcatattatttttcactctttctacgtcttttaacaatttgctttgcagtgttcatcaaaatacctaaagaatcttgaaaatcttgtttttcttcatttgacattccatcggtttcttttctaaacattgctaaaagttcttgatcatttttgttcagcgttacagattcatctgtaacatcatctaagacttcacttaatggtactttaaaaaaatcagcaaccttttgtgcactagccgttgaaggctttttcgtttcccatttgctgatgattccgttacttaaatccatttttctttctaattcagctactgattttatatcaggtcttctttctttccaaagcctcattacattgtctttcgcactcattttatactcctttattttgacacgacataagaaatagaacaaaatctaaaataaatgcttgcaatttagaaaacgggctattataataaaaactgttcaaaggaaacatagcaaaaaatcttttgaaccgccttttgtaagcataggtcttacgatttggcttatttcttatactcatataatagaacaaattctattataaatcaatataaaatctaagaaaggagtctaatatgtcactttattcagtgattaaagacattgcaaaggaaaaacacaagtcaatttatcagattgaacatgacttgaagatgtccaacggaatgatcagcaaatgggatagaagtatgcccagagctgattcattacaagatgttgctgactacttaggagtaacaacacaatttctatttaagttagctagagaagataaggaggaaaagtaattatgaaactcttagattttgaaggtcagtcagttttagacagccgagatgtcgcaaaaatgattggtaaagaacacaagaacttaatgcgtgatattcgtacttacatcaaagatatagaggagagctcaaatttgagctcacgtcagttctttattccaagcacttataccagtaagcaaggaaaagtattacctaattatctgctcactaaacagggatgcgagttcgtagcaaataagatgactggtaaaaaaggaaatcaatttactgctcaatatgtgagtttgtttaatcaaatgaaacaacagattgaaattccaagtaaattcaatattcctaaaacattgcctgaagctttgcgtttagcagcagatcaggcagagcaattagcaaaacagaaaccaaaggttgattatttcgactcccaaatgagaaaccctggtcttatgacaactaccgaaattgcgaaagattatggttggtcagccaaaactttaaataaagagttgaataaacgtcacattattttcaaacaaggtaaacattgggttttatatcaaaaatatgctgacaaaggttatacgcaatatgaaccatatgattatcaaaaaaataatggtcaacatggagttcacaacaatcttaaatggactcaaaaaggcaagaaattcatttatgatctattagctaaagatgatattcatcccgttgcagaacaaatgaacttgttagaagtataggccaggtgatgacaatgcaactagtcattaatgacactgaacttcaaaaagcagttgatcaaattatgaaagaacgtggctatgtccctgaagagcaactgcaaggaagaacaatcagtattgatgaatttgctaagaaatacgctaagccacacggacaagcatgggtaaaaagaaatattctttatccatttcaaccggattggtgtagcaatattcatccaggcagaggcggtaagatgacaatctttgaatatccagctgctatttggatgaatgaacatagaaaggaaattgattgggatgctaaataagaattattaccgtgagtttaataaaccaatccaacataaagaaagccattatgaaactatctttggtggcatcttaatagcagtcgtgatcttaacgttcactcttttgtgctatggcttttgggatgcagcatttcaaattattggaggttaactcatggaacttagcaaagaaacacaacaacgaatttgggcaattactgatgtagttactagtcagtacgaaacagggagaaaaccatcatggaagcaaaacaaggaaaagaattagctaaagaactcaactaccaaaagattgaaaaacagcgtgatttttatgctggttgggattgcttaacggtagttgtagggaatacagttcatgcaattggtcagaattgtgagtacagaacaccacttgattttattgaagaacagttagctgatgacgctgataaattcatggttaaaggtcaattcacagatgcaaaggatatgtatcagtacttatttgaaaactgtgataatcgtgaagaattaaccagcttcctagaagactattttgacggaatggagatggctgactatggaagataaggatcttaaagactttcaagattggattaaaaaaatgcaagatgatgcagacgattgggtaatttatttagtctatcaatctaaaaagaatggcaaaacttactctggcgcaatgcgttggctgaataaaaataaaccagatttgccaggtaaatttactgctagcccaagtgaggttgtagcaaatgtggttcgatcaatttatgaagaagcagtaattaaggtccgtaatgaaggtttagataaagaggtagataacgatgattgatcaagattggttaaaagatagcattaagcaagaagcgaagttaaagtttgctgctagatgggaaaatgcagaatttaattcatccgaagcaagacaagcttttcaagcaattaaaaatactgatgagtgggaagcattcaagaaagtaatgatccaagcatatgaaaaagcaattactagcaatgtccttaatcagcttcagggcattaaaaatttgattcgcgatgcaggtgaagaataatgccagcatttaaatggagtgaaaatagaaagcctaattatagatggcttgtctacggtattgctggtgttggtaaaacaacattgagtaaatatcttaaaggaaaaagttacttgcttagcttagataaaagctttgaaagagtgagattttggcaaggtaacgatgatatttgggttctggatccagaccaaccaatcgaagacttaaatgacttttatgatttttttgatcctagtcaatatgacaacctagttgtcgataatatcagtagtctgcagaagttgttttttgtcgaaaaggctaaaggaaccaaaacaggattagctaacaagatttctgattataatgaatggaatacatatttaattagatttatcgctagcgtttttaaatggaacatcaatatcttagttacggcttgggaagcaaagtaccaaattactgatccaagtggtcaagaatttacgcaatatggtccagatatcagagataatccacgggattatttaatgggtagctgtgatgtggttgcccgtatgatccaaaaaccacagtcaggtgagcgtgggttaatcatgcagggaagtatagatacctatgctaaaaaccgcttagacgagcgaaaaggcagcaaagcagaagactttttcaaatttgaaaagtcggatttagaaaaagcggtcgataaagttaaagaaaatgcaaaggagaaacaataatgtttaacaaaaatgtaaatgaagacttaaagctaaaccaggaaatggaagacaaagttgcagaaacttgtttgaagattactaataacgaaatcaagcattttattatcattggtttagatgatgatggaaatgaaattcgaatgcatcatggtcatggcattgtattatctggtctcgttagagatattcaacgagagattgatcaagaaaatgatcataccagaaatgccagtgattttatcaagatgatgcagaaaattaataagcaagatgattaaatgtttcaattatttgattatcagcaagatttaattgataaggctagaaatgctctagcagctggaaatcaaggcgttttaattgttagccctccaggatcaggtaagtcagtagtaatcagtgaaattgctaaattaacagtaaaaaaaggtggccatgtattattctttgtccatcgccaagaactagtaaagcagatcaaagattcttttaaacagcagggtgtcgatttaaaccattgcaccattctcacggtaggtaaagtagcaaatagattaaatattttagccaaaccagatttaatcattgttgatgaatcacaacactcaagagctaaaacatatcagaaaatatttaattattattctgatgttccaaggcttggttttaccggttcaccatggcgtttatctggtaaaggatttaaagatatttattcagctatggtattaggcccaactgctaaatggttaattgaaaataaaaaactggcaccatttacagtctatggttaccagttaggtgataaatcaacgttaaaaagtggatcgacaggagattatacaaaaaaatctttaaacaattacactaagtcaattatacatggtgacattgtaaaatcatggctcaagtttgctaaagaccgtaaaactattatctattgccattctaccagctttagtaaggaagtagcacagtcttttagggatgcaggtataaatgcagttcatgcagatgctaaaactcctgaaagtaaacgtgacaagataatggttgatttcaaagaaggcaagatcaaaatattatgcaatgttgatctagtaagtgaaggctttaatgttcctgactgttcatgtgtagttctattaagaccaacacaaagcctagtaatttacttacagcaatcaatgagagccatgaggtatcaacctaacaaacacgcaatcattattgatcaagttggtaactttgaaaggtttggtttgcctgatactgattacaagtggactttggaagatcgtgagaaacatccacgcaaagatagcggtagtactgaaggattacagattaaaacatgtcctgattgttttgcagttattaaagcagaatgtgtgaaatgccctatctgcggtcatgatttttcaattgaaattagaaaaattaaacaaaagaaagatcaagaattaagagctattaaagcagaaaaattccatattgatctaatagcaaagaaaaaggttagtgaactaaccagttttaaagaattaaccatgtatgcaaaggcaaaacattataagaatggttgggcttggcacatggctaaaaggaaaggatttatttaattatgggttttattaatttaaacgaaaagacaaacaacagaagtgaactatttccaaagggaacttatgaaatgcaaattgtaagcgtccatggtgatgcaagccctagcggtcatgaaaatatgcaatttgattttctagttcgtaaagacttagacaaagtttctgcattagctaatactaatgcaaaaacacatggtcgccacttctttgcaaatgtttggactgctaaggataaagaaaccggtcaagattcaggctcatatgatccagcagatttggcaaatattgcagatgcaattggtttaactcaagctcaaattgataaatacatcaagtcaaaagaagatttgatgaaagcatgtgaaggaaaattcattagaatctacatttcagtaggtgagaatacttacaaaggtgaaactcgcaaacaaaatagtaccttcactaattcatggcaaaagactaagttcccaccacaagctgctaaaaagcaagaaactgtagaagatccatttaaaggtaatacaggttcaacagatgaattatccgaaaatgatattccattctaaggagtgaagtaaatgggaaaatttacctatgaaaacatccctcaagaattgcgaagtttaaagcaatggggattgtttcaacttaaatgggtaaaggagcggaataaaaataccaagattcctattgatccttataacggtagagctggtaaatctaatgatcctagtacatggtcagattttaatacagcactaaaagcattagatgaaattgaacgtgctgatggcttggcattctattttactaacggatatgtagggcttgatattgatcatatttcagatgatttagcagattggcatcaaggtgatagttctgttagcaatctgataaacaaattccgtttaatgactgatgaaacttatatggaagtcagccaatctggtacaggtattcactgtatttttaagggagagattccaggcaatcgcagacgtaaaggcaattatgagatgtaccaacaagggcgtttctttgcactaactgggaacagtattggtattcctaagattgtcactctttcaaaagaaaagatgcaagctctttataatttcttatttggtgctgataaatcagtgccggataagattgaagaacctgaaattacagcgctagatttatctattcctgacatcatccaacgtgcagaaaaatctaagactggtactcgctttaccatgttcatgaagggcggctgggaacaattctataattctcactctgaagcagatatggcatttgctaatgaccttgcattttggactggtagagacttccacaaaatggatacgatttttcgtaattccagtttaatgagagataaatatgatgaaaaacgtggtgctactacttatggaatatcccttttaaataaagcaatcagtgaagccgttaatatttataatcctgagcaagatgggaaagagccagatctagtctttaactggaacaaacctaaaaaacgggctgttgctcgttcatgggatgatacaggaagaggacttagattaaatgatcagttcggtgatgtattcagatatatggcagctgataaaacttggtatttctataatggctcatattgggaattagataatggacggcatattgagttagcagctgaaaaagttgttaatttgattaaaactgaaaatcctgatttcagctttgctactcagcaggataaagataaagcaatgaaagaatggaataagttcattaaagaatcacgttcccatatggcaaaaatacacatgattgaggagtttaagaagtacgtaactattgatcacggtgtatttgatcatgacaacatgcttctaaacactgaatctggttatgttgatttaactaacggtgaattgaaagatcatgatattaaaaagatgtttagtgaacaaaccgcatcagaatattcagacaatattgattgtcctatgtggaaagacttcctagaacaaattttcaatcatgatgagaaattgattcattatatccaaaaagctgttggctactcaattacaggatcgactgctgaacaagtatttttcttgctacttggtactggtagaaacggtaaatctgtatttatcaatactatcagaaatattcttggtagttatgcaaagcagatgtcagttgagtcaatcatcgtccacaattcaagcggaagtgctaatagtgatattgcacgacttgaaaatacacgtttagttaccagttctgaagctaatgaaggttcacgtttagatgaatcgttagttaagcaattaactggtggagatagaatcctagctagatttttatatggtcaagaatttgaatatgatcctaaattcaagatttggatggctactaaccacttgccattcattagaggaactgatgaaggtatttggagaagaattaaggttgttccattcaatgtacaaattccagctaacaaagttgataagaatttggaaaacaagttaaaagctgaatggactggaatcttaaattggatcgttcaaggcgcaatcatgtggcaagtagaaggcttgaaagaccctgaagttgttcaagatgcatccaagcaataccgtgaaaacatggatccacttgaagcatttcttgatgaatgctgtaaagctggtagcaattacactatcatgggtagacctttatacaatgcatatcgtgattgggctagagaatctaatgaacatttgatgtctatgactaaatttggtagagaaatggctaagaaattgcctaaaaccaaagaaagaaatggaactcgctatgtaggcatccaattaaagaaagaaccacttcattttgattggaattaatggctgtgattagttgcggttagttgtggttggttgtggtgagtatatgtggtagctcaaaccgtttgggctgtaggggtgtgacgtgtttcggttagtgtggttagtttaaaagcctatattattatatttattttcttttttataatttactttttaaagaaaaaagtagtaacactaaccacaacactacaggctgtaggcgtaagacccaccacaaactcaccacaaactggtcacatttttagccaacccaccacgattagcagtctactatattgagtgctaagaaaaataggtgacaaattggcaaaagatgtcatatcggtatttaccaattatcaatgctatacaaaaactcaccgctgatattttttgtgacggtatcagttaattcactacacttcatcagtgtggaagtcacttgagaggaaagaatatttaaatttgtgtaaatattgtgaaatcaacccaaagacaaagctaggacgcgactactacagagatgactatgttgatccagatgagattaataaggtgaatggtgaagacggaataatgtttacttacatcgattgtaaaaatcatccagctttaattatttctcatcctgatcctgagtgctattctcaggaaactgacaaaatctttataggtaattgtccctggtgtggacgcaatttaaagaaagaacatcaaaatgaacaatcataatttagctgaataccattgtgaacattgcggcagagaatttattattgctgaaattgatgatattaaacattgcccttattgcggagatatggacattgctagatatagtttgctaacgataactattgattaaaggagcatgaaaatgaaagatgaaaacggacgtgatattaaattgggtcttgaagaagctagacacataatggctacagattactgtgtaagatcagatcttgctctatgtggtgagttctttaatgaatatggtatgttgcctcaggagtacataaaggagtatggcaatgaaagtaattgataaaagaacgaagaaaactaatgaggattacaagtatggcgatattttaatgtgttgggataatgatccagatgaatataatctgtttagaatctcgactttttatgatagttattatgaacaagatcgttgtattgttgtaactatacacagtagtagtgacaatgaagcaaaaacttgggaaggattatttgactcacctaaagaagcggctagggacttaaagaatagttataaccacgctgaaaaagtgaatgcatacattgtgattactgattaacggaggaataattatgtgcgattactgtaataatgaaaaatcaattatttcaattgaagatacatacgaagatgggtacacaggtattgatagatatgaaaatggagatgtttatattaatggaaatgaattaaatttatcttgtgatgtcgaagttacttatgtatcaaagagtagcaagattaactattgtcctatgtgtgggagaaagctagaaagtgaaaattaaaaatgaatgcagtttcaaaaaaaagcatctgtccatattgtcattttgaaagtggatcagaggatccgatgaaaactttttatacagatggctgtgaattatttatcagaaaagataattcactagaagtggttcttattgattattatgatgacttttcctttaaacttgataaaaaaatcaaattttgttctatgtgtggtaggagattagataaatgattattagtttattttacagagtgaaactattttttaagcaattattttgtcatcacagttatgtatataaaacatcgctgtttagccttagcgactattatatttgtacaaaatgtgaacatgttacatataatcgaccaccgaaggaactaatgaaaagagttgaagacgaatgacatcagtttcaagtagctgctatctttgcagtacattaaatgcttttcacgatggaccggatttatatgcgccaaaaatgaatagatttcacgttaatctaaatgaaatggatggcaagtggtacttaacgattaaaggcttgccttatcctattaagtattgtccaaattgtgggcgaaaattggatgagaatgcaaaatatgaagtaactgattggttataaatgacagcaaaacaatatttcaatttaacattaattttaatgaactggttaatagtcttaatttctttttgttttaaaaatgaaaaattagatttccttatgtttatttggaccagtatatcgtttacatatttaatgcttagttaacaggagataataaacatgacaggaaaaacaattaaatttcaagcaacaacaaataatttcaaagttaatggtaataaagtagttttgcaattagatgcagacctgcttactcataagattaacttaaacaagttaaaagacattgcttttgatggcaatggagttcaagtaagtcttgaggctgatcaacaggaacttattcctgaagaaaacaaggataataagccaatgctagttagggatgacaagtaatgaaaactgcactgcttgtattatttgcaattctttaccctacgataagtgtactgaatttgttttcagattataaaaccatgaagtctaacaacgatcttatgaaagaaattcataaaagtaatgatttatttgattctttattggaagaagttcaagcaaataaaaaattaactgaagctgtgcaacataaagctactgcacaagataattttatgtgggaatcaattgtaattcttgcaaaaagaattcataacctggaggacaacaactatgttaaataataaaaaggctatttttcatgacaagaatggacgaaaaatttatccagattcattactttatgatgaagtcgctaatgagtacttttttccttatcgaaaaaatggtgtttggggtgatgactttttaggcgatttctacccacttaaagcatcacagttaatcttacagaaaaaacatgcaagtatggatgacatgaaattactgatgaaattgcctaatgaatcagacgcaattttcaacacggaagggtttatcaatggaaagtgaacatagtatacaaaagaaaattgaattagttgtctcacaacatcattgtcatatattccgtgctaatgtcggtaaaattagaacgcctgatggtagattttttactacaggcttgccgtctggctatcctgacttgcatggctggcgtgattgggatcatcaagctttttacattgaagtgaaaaatgctactggtaaaccgcgtcctgatcaaatagctttccataaaatgttgatgaaattcaatgttattcatggaattgcacgaaatactaatgatgcacttaagattgtggagaatggtttagttggctatggatatgaatagaagaggtgattgtatggaagtaacaattgacgcttatacttacgatcaattaaaagattattgtcaacgaatgaacgaaccaatgtcagtcattgctactaaagcaattaagaagtatatcgatgcgagtgactaatatggaattaactaattatcaacgtgctttagtaataattcataaattagaagatcggtttggatcaatttctaaggtacctgaatctaatcctaaaatgcaagaaatccatagacttttgccgatgggacgtcaatctgaagacaaaaactatgctcgtactgaagagcttaattatcttggctattcaaacgcacatattgcacaagttactcatcacggtcaagctacgattaattcttatttcgaaaagcatagtattaaaccaaaacagattttttactataaagttgtagcacctgatcattcaactacttattatgctgacactttaatacatttatataaaattatttttaaaaagaaaattgctaataataattatgcgaaaatacattttcttaaacagggatatgctgttcgaactggcaaaatcatttggatgaatgttatggataactcatattattgcgtgaagaattcatcaaatctgtatattaaaaatgggcttgattcttatatgaactctaaagcataaatgcttggtatagcttataatagatgtattagtaattgttattcttacctattatatggagttgattgttgtgaatatttggtctgatgtagattttgataagactgctaaccgtgttgataagttattaaaatataaacttcctagattagctaggcgatgtggacgtagtttaactgatttgtctagtcctcaattgtctagcgcttcaagtcatagtaatcgcactgatggacaagagagaatgatggttaattcttttagcattgagaaggttgttgacgcaatatgccaaacgattattaactgctcagataatagtaagctaatattaataggtaactatattaagtacatccctcaagagcaattaattatgcagctaccctatgaaaagacctactattataaagtacttaaaccaatcgcacttaatgagtttgcagatctttatgatcattggcaagatgaatgtgatgttgaacctgcagatcatattgatctgcatgtatatgtgaaagctgatgcaatttagcttatttattttttaccttgccagtgaacttttagtggacaatcactggacaaacagtgaacttcatgcggattgaaacatggcacaatatgtattgtcggatagtaaagaaaaaggtccgatgtcataacacaacaatcttagttttcttcatgttgttgtctgcattcaattgacaactaaatagacatttaagtacaacatgattaataaacacttggaagaatattttccaggtgtttttcttttgcaagcatagtgcaatggctagcacaatagtctccaaaactattaatctaggttcaagccctagtgcttgtgtttatcaaatgaaaggagccagtcaatgccacgagttcgcagatgtcgttttccaaactgtcatgagtttgcgatgatgccaaatcattattgcaagaaacacattgaacacgaaaaagaattgcaagaacgcaatgagttttatcgcttgcatcataaacgcagcaagcagtcgcaatggcgatacaatcacatcactcgctatcgtaatccggtcaagacagagcaaaacaaattctatcattcgaagcaatggcgtgagatgcgagcaatagtttttaaacgtgattaccatctatgccagtactgcaaggctagaggtcaattaaatgaaggtaacattgtagatcacgtactaccagttgaaaggtatccagaagaaatgaagaatcttcagaacatggtcaccagctgtggaagatgccactactggaaaacacgttttgaagagcaatattatggcacaggacttcatggtaaaccaacagataatccgccaataacggacgtaaaattgattgctaacttggcggctagattgaaaaatgatcacgctgtaaatggctaaaaattcgcttctaagagatttaaattttgtaagtgtaattatacatgaatcaaaaataaaaagacccccgccccgtttttttaacgtctagggagccgcatcagtgccgttttcttgtgtcacaaacaaaattttaaaagtttttgaaagggggctgaaacatgaacaaagttgatctatcaaagccgaaagtacctaatcaagcacctaaatggcttggaacttacggcaaatatttgtatccaaaacttgccacttatctcaataagaatgacaaaatcttacgtgctgatgaatatttacttcaacaatactgttcagcctacgacacctaccgcatggcttatgaagaagtccttgaacatggtgttcagcaaccaatctataaaacggtcgtctctcctgtggatggcaaggaagttgctaagaattttttaggatacaagaaaaatccagcttatcagatcatgtctgattcgttgaaacagatgaataccattggtaaagaattaggattaagtcctaaagcaagaagtcaaatgatggatttaaatttacctactacagatgataaaaaaacagctgttcaaagcttgaaagatttttttaagtgattaatttattttaggttttgttgattatacacaaataattgtgtataatatacttagaaattgaaaggaggtgaaagatatgccttggaagccagctaaaatggttcgttttttaaagaagaatggttttattgaattacctaaaaaaggtggtcatagaagattttttaatccaactactggaagaaaaacagaagttccaatgcacagcaaagaacttaaaaaaatgactgaaaaagccattcttgaacaggctggattagaaaagccaggaggttaagcctcctagctttggcatatcataaaatatgaagcaaaatatcgtagcttatcctgcaattcttagtgaatataatgatgaatcaggtcattattatgttgtaacttcacctaatattcaaggtatggtaactgatggtgaaactattccagaagcattagtacatgctgaagatgcaatggctgcaatgttagatggtgaagaaaaatatcctaaagttcaaaatcctaaagaatggaaattaaaagataaccaacaagtaacatgggttacggtcaacatgacaaagtggctcaatcaatatggtaaaactgtaagaagaaatatttctattccagaagctttaaatgattgggcgaaagaaaataaaattaacgtatctaaagttgccacggatgcattaagagaaatgcaaggataatttttagggcttaatcacgtttttttgtgattaagcctattattttgcctaaaaatagtaaaaaagaggtgattgatgcaatgaaaattgatttaacacaaactcatgacgttgatggtgcttatcaggcaattaactataacgacattagaattaaatacaatgatgatgccacaaaatattgttttgatgtattagatggtaaaagattagctggttatattactaagcttgcttgtttcagaaacttacaagacttgaaacgtcaaaatacatctgattttccttaccattatgatgttaaagaagtacaaaatacttttaagtttgcatcaatcattccagacgttgatttacataaaccacttccattaatggattggcaaaaatttattctagctatgattaatggctggaaagatgcaaacggtgaaagaagatacactgacatccacataagtgttggacgtggacaaggcaaaacacaaatagctggtatccaaatgtgcaaggctgtcttgattgatacgcttaacttcactaacaaggacttcttgattactgctaatacatctgatcaatcaacaaagttgtttggttatgttaagaaaatgcttgaagcagtcattaagattgaaccgtttgcatccatagctaaagagtcagggcttgatttacagactaaccaaatcattgaaaaagaaactaacaataaggtatggaaaatcagttatgaagctgataaatacgattcaacccacaatgttttagctatctatgatgaaaccggtgctcttgatacatatgatagaatgactgatattacagatggtcaagcacaagtaattccatatcatcaattcatcaaaattagttctgcttatcctgatccaacaagtccgtttcatcaagaacaaattacgatgcagcacatcatggaaaaagattatagccgtgaaggtgataactctctctgtctcgtgtgggcgcaagatgaccttgatgaaactttcaagcctgaaacatgggaaaaatctaatccattaattggtttatcagatgaagaacgcaagcgtagaactgacaatttaattaagcaacgtgatcaaggaatgcttactaatacgcttcataagttccagaataagaacttgaatttgtggcttaaacaatcaactgctagctatttgaatttgaaagacgttgaaaaagctatcaatgatgatttcaagatcgatggcttaatttgttatatgggttttgactactcaatgttttctgataatacagctgttggttttgcttttccgtataccactcctgaagggatgcataagtggcaaatgatgcaacattcatttattccatggcaacaagcaggaagtattgaagctaaggaaaaacaagatggcttgccttatcgtgaattagctaaaaaaggttactgcacaattactagtcatgaaaaaggcattatcaatcccgaacaagtttataaatggattcttgaatttactgaaaagcatagactagatgttaagttttttggctatgaccggtatggtagttatcaagttaaaaatattactgaaagccttaatgcaaatacaggttggttgattcaagatattgcacaacgaacttcagaacttgctaatccaactaaattcttgcaagaagcttacgctactggaaaaattacacgatttgatgatccaatcgaagaaacggctctcttaaatgctgttattagggaagacaagattggtattcaagttgataaggacaaggctactaagaagattgatgttgtggatgctgaaattgatgcaatgtatcaaggaatgtacaactttgaagattatggattgatcaatgacaaatcacatcaagtagaacggatgacacaagaacaagtgcttaaatggtttgaaaatcctgattctggtcttttgggaggtgaaacgggtgataattaaaacgctgtttgaaaaaatttggaaattcttagatgtaatcctttatttattgggctttggctttattgtcatagctctttttttatggaataaaatagcaggttttgcaggtctaggaattgctttacttttaacaggcttattaattgatctactcccacatggtcagggaggaggtgatagataatgcctgtttttaatttaaataaaagcaatgtatcaggctacagcttaaatgatcctgaatttattactttatttaagaatgatttatctgttagtgagtatgtttccgcagatactgctttaaaaaattcagatattttctcattgatctcacaattatcagctgatttagcactggtaaaaatgaaagctgataaagatagagcacaatcactgattgataatccttctaatttaactaatggctttagtttttggcaagggatgtttgcacaactgctattagatggcaatgcttatgcctacagatggagaaatatcaatggcgttgatttatattgggagtttttaagaccgtctcaagttcaagtgatgctcttagaggacggatcaggattaacctacaacattaattttgatgaacctgatattcaaacaaaggagaacgtaccacaaagcgatgtgatccacatcagacttgtatcaaagaatggtggtaagactggtgtttcaccacttactggtttagctaatgaactaaatatcaaagatgcaagcaatcgtttaacactccatgctctttctcaatctgtggaagcaccaggaattttaagtgttactggtggcggtctgcttgattggaaaaagaagtcagctagatcacgtgaatttatgcgtcaagttaataactctgataatggtccgatcgttttagatgatttagagacctatcaaccgttggaagtgaaaagcgatgtagcaaaactactgcaacaagcagattggactggtaagcaaattgccaaagtctatggtgttcctgattcttatattaatggtcaaggtgaccaacaaagtaacatcactcaaattggtggtcaatatgctaaggctattaatcgttatgctggtgcagttcaaagtgaactatccaataaattgaacagccaaattacctatgatgtgagaccagctattgatgcaactggtgataactttgcatctgaaattggtgatttatcaagtaaaggaattttgtcaggcaatcaagggcgctatgtattacagcactatggttatttgcctaatgatttacctattcctgataagtcaattattccagcaaatgaaggaggtgaagatgatgacgacagtaccaatcaagggaataatcgtacccaataatttaggtgatatttattcatttttagggtatgaagtggctagtcctaatcaattaaatgaagcgttgagtaatgctaatggtcaagacgttatattggaaatcaactcacctggtggttacattgatgctggttctgaaatgtatacagctttaaagaaatatccaggcaatgtaactgctcaagtagttggtcaagcttgctctgctgcttcatggattgcattagcggctgataaagttgaaatgtcaccaaccgctcaaatgatgattcatagagtaagcgttggtgttgaaggtaatgtagatgatcttactagtgcattacaatcattagattcaatggatcaaacctatgttgatctttacagcaagcgaactggtttagataaacaagaaatttaccgtatgatgtgtgcaactacttggatgaatgctaaacaagcggtagataaaggttttgctgattctattatgtttgaaaatgatcaagcaccagcggttgttaatgcttatggagtgcctgttttaagtagcggtgcaattaataagattaaaacattaattcatgaaaagtccgatgatgactctaaacccattgagaataaacaagatacagataagggacaagtcaaaaaagacttgtcccttttgttatggcaatagaaagaagagaacgtatgaatttacaagaattacaaaatgcttggattgaagcaggtaataaggttactgatctctttaataagaaggtagctttacaaaagaattatgaagctgatcctgaatctgtttctgctgaagatatgaagaagacggctgaaaattataacaaagctgttcaagctcgtgattttgctaagcaaaactatgacgatgctgtagaagctcaaaaggttaacaagcctgctaataagcctgttgaaaataagactgaagaaaagtcgaagaacattgcttcaggtttcaaggatatgcttagaaacccaatgaagtacatggaaaacttatcatcaagttcaactgctgatggcaatgctggtttgactattcctgatgatcaacaaactcaaattaacactttgatgcgtcaatatgatgacttgcgtgatttagtaactattgaaaatgttggtactgatcacggtactagaaacattgaaccattctctgaaattattccaatggatcaattggatgatattcctgatgattcaactaataattcagactataagtggcaagataaggacattaaggaaggcaattacccatcagttaagcaacttagctataacattcatgattatggtgatgtattctttgctccaaatgatttaatcaatgactcaaacgcaaatattgaagcatggttaaaccaacacattgcacgtaagaatgttgttacctataactcaaagattgttggtttacttcctaactcacaaaagaaggctactatcactaagcttgatgacattattgatgcattaggtgaattggatatggctttatggggtggcgctaccttgttaactaacaagtctggtttcttgaccttagctaaggttcgtatgtcagacggttcacgtgccatgaacgttgatccacgtactcaacaaaccaccttcaacatggatggtatgcaatacattaacgttcgtgtggttgaagacagatacctttctaacaacactactgttggtggcaagtatcaaagccatccattttactttggtaactttaaggaatttattcacatgtacgaccgtcaacaaatgtcattgcttacttctaacattgctgataaggcatttagacgtaaccaaactgcgatccgtgcattgaacagatttgataccaagatttgggatgatgaggcgatgatttcaggttcatttgataaggttgaaagccaaccaatgcttatgcaagcagttactgcaccaacaagcactgattcaggtaagtagtagaaagtaggtgatcaataatgaccacttatttaaaaattgatgatgggcttaagcgctcacttggttacttgcctgatgatgatgcattggattcttcagatgaagaacgtatggaagcaacactgaaaggtgctgaaaattacgttcagggtgcaattggtgaagatgctgatgatagtttttacaaagatgattcagtgtttgagctgtataagctagctgttaatgcaattgcaactaactggtttttgcatccctctgctgctgtgtcatcaactacagcaaaacaaatcataggtcaactccgtgggacttatgatgaatcaaaggtggtgaatgacgatggtgcaacttcagagctgggacagactaattcataaaattgtgtttggtactgttgatgatactgaagatgataacggtcttccaacaaatgagtttaaacgactcgcaaaacctacactatgtggacattggggattaactactggtcaaatagttcaaaataaagggcatcatcgtgatgattcatttattgtagttattcatcacaaacgtgattatgatggtatcactcatgcaatgcttaacaataagctttatgaagtgagtgatattaatcctgatccatttcaaaatccaactgcaggagatttgatcactctcacacgagtgactgatcgtgatggttgatttagataaaggcttaaatgattggctagataaaattactaagaaagttaatctatctaccaatcaaaaagcagaaatcactggtgaaggtgctaagacttacgctgaagttcttaaaaagaatactccaaagtctcatgcaagctatgcacatgcaaggtcagctggtcatggtcgtaagtctaagcacatgagagatgccattacttataaggctggttatgaaatcaatgatggtcaaactggtgatacatctgtaggttgggaagataaatataatgcattagtcgcacggtttgttaatgatggaacacgtgatatgtctcaaaaagaaatatcaaatctacattttaaagaccatgcagaaaaagaagctgcagatgcagtactaaaagctaatgctgaaaaatttagggagatattagataaatgactactgttgcaaagcaggtagttgatcttcttaattcttccaattttcccaaattgcataaagcctactcttttgcggttggaactagcgaacgtacaccacgtgaatctgtggatgtactcgttagtgaagtggattttgattttgatgaatcaggcagtaaccaatacacggaacagatacaacgtttagcgataaacgttttttatagtaaaaaaacaacagtagacatgaacgattttgaacactcgctcatgtctttttttgtagctaatggttggcaaattgtagctagttttgcaggtcacacatacgaccccaattctggtgaaccaacaattagctttcagataaaaaggagaattacatggaacttcaaggtttaaatgatttacttgttttcaagttcgataaggacggtaagcttgttaccgatgaatcaaagggcggtttgaccaccaacattggtaaagatggtgtatttaaaattgatttggaatccagtaaaggtgctactcaagctaacatcactggtctttcaagaactgcacaagctgtttacggttctaacgcaaaggctgaacaacactttggtgcatatcaaattactggtactttcggtgctaacgacattccacataacttctatgatgcaatcgtaggtcttgaaaaggatagcaagttaggctttggtaacatggctaaagatagtactccacttgcatatggtggtgttattgctcactcatacaactcaaacgttggcgttgatctttactttgcattgccatacggtaacttgactcctggtggtgacttaactatgggtactgatactgaaaacccaactttggtacacgatacattcactcttaatgccgctgcacgtccatcagatggtttagtttacgaaaaattctattcagatgaagatggatttaactttgacaagatgcttgattggattatttcaggtactgttgctggttcaggtactgaagatccaactcacaagagtgctgaccaaggtggtactggtgatctaaagaaagatcaaactacttcaacaggcactcactaataattaattagtagggtgggtagcggtggcaaattaatataaataattttgttaagaacggtgtgaaagccgttctttttctttttttgaaaggaaaatcaatcaatgttagtaaaaatcaatggtaaaaagcttcatttaactacttttgaagttgaaacaactgtaaaaaacgtacgtgcatgtttaaaggcacaaaaggtttttgcaaaattatcaattgcaattaataaggttaaagacgatgatgaccaatcaattcttgatgttttaacagcacaagaaaatcttttggatgaagaagaaaagtttttgaagaagattttgcatttatcagatgcacaagtagataagattgaagattctgctccagaagatgtaagtgaatttgttactgatttaattggaaaaatcttacaagtagacgactccaaaagcgacaacgattaatgatcctgatccagtacatgcctatgaggaaatgctggaagattttgattatcaagaacaacaaatgattgttaatgctcatatgtccctagaagattatgaaaacactgattattaccgtcttgtggaagtaatgagtgcaagaccaaaggacaaacgtccaatgagtctttgggactttgcagcaagtttagacaaaacagaaaggaggtaaataaatggcaggaagaataccagttggtacactgattacagatattaaattaaacggtgatcagcctgtaaaaacgttacgagaattaaggcaagctgtatctagtactaccagtgcatggaaagctcaagaagctgttttaagaagtgctggtaagactactgaagcggctgaagctaagtacaaaggcttatctgatgctgtaaaaagtcagcgtagattaattgatggcttagttgaaaagcaaaaatctttaaagaaacagcaagaagaaattgatacttctacagataagggcaaaaaagcttatgaaagtatcagtactgcacttcaaaagaatgctactcaaactttgaaagctactagtagattagaatcactgactaagcaacaggataaggctaaaaactctctcacttactacaagtcaggattagcagaagctcaaaagactttaaaaaccactacggctgtttcaaaatcgtatgttgatcgtttggaatctgaaggcaatcattataaagctaatgaagctagaatttcaggttatagaagttcgatcagtaatttaactaagcagtatgaaattcaatcacgtgaattaaaacgtattgcatctgaatctggtgcaactagtgaagcttacaagcgtcaacagatcagagtgaatgaaacagcgacttcattaaataaagcgaaatctgctattagtggtcttgaagcagaacaaaagaaaatcaatcctacaccatgggatagattaaaagctaagatttctagtgttaataaagaaagtcaagaaactcatagaaccttgaaagaggtcttcatgggatctgcacttggtaacgctgtttcaaatgctgtttctaacttaggatcaagccttaagtctgcttacacagagggtatgaacttgaatttagcaattgctaagatcaacggtaggttcaaaggcatgggtatgaataccagacaaattcaagcccttgataagcagatcggtgagttaaagtccaatactgacttagctggtgattcagcatcaaacttgcaagctcatatgcttaactggtcaaccattggctttaaaggtgctatgcaaatggctaaaaccattgctggtgtaggtgatagttctaagatgactggtcagcaaattgaccaaatgtctgcaggactgcaaagaattggtagtactggtaaagttacttattcctccttgagccgtattaccaaagctgctccaacattcatggctacacttgcacatggtgctggtatgtcagaatctaaacttagagcacttttaaaaactggcaatgtaacacaaaagcaattccaaacttggattgctaaatcatctaagtatgctgatgaaagctttaaaggttatggtcaaagtcaagctggtgctttaaaagctatgactgttgctagacaaaaactagaacaggaatttactaagccaatctttgatgctaagactagtggcttgcaagccttgaagaatatcatgactagtaaagaagttatgagcggtgctgaccagctgggtaaagcagtatcaaacgttattggctacttagataagcataaaggtgatattgtagctatcactaaaaatgttatctctctaggcgtggaagttggtaaggcagtttggaaagactttgcagctattattcaaaacattggtaaagcacttggtattgttaaaggcaatggcaaggattctggtagtgcattacatacacttgctactgctacaggtgatttagctaaaaataagactgctgttaaggctatatctgatgccataattgcaatggtagcaattaaaggcatccgtaaagtcagtgatggtcttttttctattggtaaaggtgctgttactacttataaatcagttaaagcattacacgatggtttcaaaggaattgaattagctaaagatgctactaaaggtgaaaaagcttgggctaagtttggtggcgttctatccaagacttttagcggctttagaaaagttggaagtaaaacttggactactgtagaaaaagctggcatcaaagcttggacaggtattgaaaaaggctgggctaaagcaagtgatttaggtacaaaagctggaaaagcaatagctaagggttttagagctacaggaaatgtcttagcaaaggcaggcaaatggagctggagcaaaattaagtctggctttaattttgcaaaaaagtttggtcaagaaataggcaaaaagatttcagcaggaattaaagctactactaagttctctatgggtaagcgtcttgctactggtgctttagcaggtactgcagttgctacacctgaagtgatcaacgctgttaaagatcgtcacaatgctaatgctagaagtcaagacattggcggtgctgttggcgctgtcgctggtggtacattaaccagcatgattccagtagttggtccaatgctcgctcccattggtgctttacttggcaaatatgctggacgttggggtggtcaagctgtcaataatttcaccaaaggctggcaaaagaacaaaccgccaaaaaaattctggtcacttgaaaatctcggctattctgcacataacatgtggaatggatttactaagggtgtaatcaataccattaagtggtttaagaaaaactggaaagaagtcggtttttactttgtaagtccgcttgctggtgctattaattcactttacaaacacaattctaagtttaggaaatgggtgaacagcttagttaaatcatttaaaaatgcttggaaaggcattgggaaatggtttggtaatgttggtaaagctgtgcaaaaagcatggcgtggaatgactcattggtttagtaacttaggcaagaacatggctaagggacttaagtcagcttggaaaggcatgtctcactggtttagcggcattgctcgtggcgtacgcaatgcatggcattcaatgacagcttggtttactagacttggttctgcaatgtctaggggactcaaagcaacttggagaactgttactagatggtttggcggtattgctaaaggcgttcaacatgcatggtcaggaatgtctcatttctttggccatgtaggctctgcatcagtaagactgtttaagtcagcatggcatggaattacttcatggtttggtggtattatcagtggcatcaagaaagcatgggatgatttctttggtggtatcagtagtactgttaagttcattggtaaattgctaggtggcaaggttaaagtaggcaatgttcacttagctgaaggtactgattggaagaagaaatacggttatccagccatcttaaatgatggtcatgattcgccagctactaataataaggaaggcattttaaatcctgatggctctgtggaagttcaacagggtgtgaatgtaccacgttggatctttccatggcaagatgttatcaatgctcgtgatatggctaaattgtttggtcgttctgttcaccttgcaaatggtactgttgatttacatagtcttgaaggtaagagccctgctaagattttagttaatcttactaagcttcttaagaagaaatacgatgaagaccgtgtgcgtcatcaaaagcaaaaagaacgtcataacagaaatgatgcttctactgctaatgagcgtaagcgtctgattaagcatgaacaagatgacaaggctgatagagctaaagtcgctaaagaaattagagacgctctaaagcgtggtaaaaatacccaaggcttgattgtacagttaaacaagttaaccagtcgtattagtagagaccgtaaagccgttgctaagactaatccgcaccacggtgaaacactcgtggatgaaggattattacttggtgctaacagtcgaattggcaagtccaagtggatcagtgatgcactctttaagaaacttactactgctcctaaaactaagaagaaaactaaaaagcgcaaaacaaagaaacgtaaatcaactagaagaagatccacaagaacatccacagcaagacgttcatattcatctggttcaagtcgtgtttctgtaccaaacgttagtgtttctagtgcatcacttaaaggcttatcttctaagtcaatttctgtaactgctaaggtaaaaggatctaagcagatcaaagcccttgaaaaggctatgaagcgtattaagggtggcactcataaggttactgtaaaaaccaagggtgttaaatctgttaagtcactctctaaggcaatcaagaagatcaaaggcaaaaagagtactgttagtgtaaaaacaaaaggtactagccaattaaagtcattacacaaaaacattaatactgttgaaaaacgtcttaatgttttagctaggactgctaaaaaagataagtttggcgaacaaatttctaggcaggctgaaaaggctgttaagtcactcgaaggcaaaggtaatttcaccaagaaaatctctagcatgtctaaagcgactgttaaagatttcaagtcaatgacttcaagtgttggtaaaactactgataagatcagaaaatcaactgaacaagactttagtaatctttataaacggtcttaccaatctgttaagagattgcacgatggtgtaatcaaattaggcactgctactgctcgtggttttggcggtgcaatgcataaaatggttggttatgcatctgattcaatgcgtggcacaatcagacaaatcaaccgtggtattcgtggtattgatgctgtattaaagcaatttggtggtaatagttctgttattaatccagtccactttgctaagggtactgatgcaaatggtcgtttaactcatgacactttagcagtcgttaatgatgctcaatctggtccacgtcaagaagctgtagtaactgatcaaaatgacattattattcctcatgggaataatcgtaggatgctattgagaaaaggttggggtgttcttaatggtactcaaactcaatcactctcacttccacactttgcaaatggtactggcattagcaagaaagaacttagaaagttagcagaaaacagcttaaagcactttgctgatagctttaaatcaatgtttaccaataatcttgatgatgttggttctaatttaactaaagattctactgatttgagtaaacgttctggtactcactttggtaatccatggtctcaagccatgtggacggttatcaataaagccattggctctggtggtggttcacgtgctaagttcttgcaatatgccaaggatacttttgaccgtgttaagtatcaaatgggtgctgcgtcaaggaccttatctgactgttcaggtatggtaatgcaggcacttagacattttggaattaacattggtcgtactactgttgctatgcaggaatcatcaggtgttcagtatttaggtaaaaacttatctaaaacagagcctggtgatttggtcatttttggtcatggtactggtgcagctggtcacgttggtattatcaacaatccaagcaaaggcacaatgtttaatgcctccccaccttatgcacgtatcagtagaatttctgatgcaatgtctatgggctatggttactaccgtgttaaaggtcttcacgatcaagctaagcatcaacctaagattaaacctagtttgttagctttagctaaacgtgaacttggtggtaaagctcttaattggattggtgatcacttgtcagaaaatgaagatggtataggtggaaagcctacaggtgatcacttacactggttaaaacaagccggcattcctgaatcttggtggcattatatggaattgattattgatggtggaaatggaatcccaggtgaatctcactggaatcctagaattactaacccatcaagtggcgcttatggtattccacaatcattaccagcaagcaaaatggcatctgctggtagagattggagaactaatgctattactcaattgagatggatgaaagactatatccgtggacgttatggtactgctaaagctgcatgggaacacaaggttaatacttctactcactggtatgctaatgggggtattgcaagttcgccaagtatttttggtgaagcaggacctgaaatggctgttccgcttattccaagtaagtcaactcgtgcttgggagttaattggcaaggctgtaggtattcttacagctaacagtaatttaaatgctaaccaacaacgtatttctaataaagatgaaaaagatgagcatgacttattaaaagccatgcttttagttttgcaaaaaatgagcgctcaaaaccgtgatattcatatcacacttgaaactcctgaaggtcgcaagctgtgggagttagttgagccgttctacaagcaagaccgtagacaagacatgattaaagaaagaaggggattaagtgcaagatttagatgataatgtgaagctgatttttcaagaccatgcttcaacagattttggcatggtcgtacaaaagccatgggatttaattcatccaacagctgacattgatcctacacatataaaaggtagaaatggtgatttcttacaaaataatcaatcttaccaaaatgtgactgaaacctttaatcttgaaattcttagaccacctgaacgtggttggtttgattgggaacggtctgtaactgattggctctctgctccaactgatcctgatgggcggatgaaatatcaatatcttaaattcactgctgatccaacatatgtgtttaaggctattgttaaagatccattcactgttactaaagatgtaactagtgattttgttggtgtatgtgcaataccgttttattgtcagcctttccaatatcgtattgatggaattgcttatatcccattgcctgatagcggtgtggtagttggtgaagaaaaatggtctgctattcctgattggcacttcattgcaaatggtagtttcactttgtacgtcaatggcttgccttacacgtttgagaatatggaaggtgaattttggcttaatggtgctactggtgatacttatgatgcagatggcaatctatacaatacacaaactcattttcctaaccttgatactcctaaattgtggaagggtcagaatactatcactgttactgctgaaactggcactactatcactaaagctgaatacaaaccaaattggaggaggttgatctaatgaaattaactgtaggtacaattcctgaagttgattatggtgactactctgatttgatgacaatgccacatctttatgacagtattgccagtgattttactagtagcggtattcctcttcctgatgcaattgattgtcaggttaatggcaattctaatcagttttggtctttaactatgacttatccaagatcaggattgcaccaaaaggaaatccaacctaacaaatggattatggaagactgtgatcctaagcacgtacatcaatggtttaaaatcatccacattactcccgaattagataatgtggtggttgaagcggaacacattagtgcgttacttgctaactctactgttgctgatgatattcaattaaacggcgcaactgcacaagatttaggcaatcaaatccttaatcaaatgcaggagcagagagaatttactttctattccgatgttaacaaagtaagtaaagtgaatattcaaggcggccagcaggcaagtaatttgtttattgatcctgatcaggaaggtgatactgttactcaatcagttttaggactgtttggcggtgaatttgattttgataattggaatatcagacattcaaaacgtattggacgtgattctggtattaaagttacctatggtaaaaatatcaaaaccacctttagtcaagataagaacattcagaacatgtatactggtgcggtatttgtcgctaagtatgtaccaggtcaagcaattgcgaaaaataattggcaaggctgggctacatgggaaagcacttacgattcagtaggtatcacttacatggctggcggcaatatcaatatctatgattgtcctgtagatggtcaaaagatcattggtactttgcaaaacgggatgaaactgcacttaggtcagattgttaatgatggttcatttactcctgatggtaaatatcaaattaacactgttaatagcgatagctggtatccaattgcacaaagtgatggcggtggctggattgattctaagtggatcaattttgacacatcaggtgcttatgcaattaacaatgtcagtgggacggtaactgttaagagcagtaatccgtttgatagtgaaggtgtaggttctcgtgttactgttcatggctctgctgtagttgcttacggcaaaggaaaatcaattagagtattttattcacctgaaattggtcctgatcaccatcctgttaagtcactaggtcaagactggactgttaaaaatggtactgttgttgactatgacatggttgaacgtaattcaaacggtgatttatggtacagaataggaccacaccaatggctgtatggaccacacttatcacttactgaagaagacagctaccgtcaatacagcaactctggttatggttatgttaaagatggcgctgtaaagtatcactttactaaggaccataaaatggtgtctagcaatactactgttattaaaaaaggtagtggcaaacatgcatggcactgggctggtaaaggcaagaaacgccataaagtttacggacatgctaattactgggccgaaaagcaaaagaaagtcaaagttactgctaaaaaagggatgtctactattgataaaacaattactcaaggcggtaagacctacatgcacacgagtcatggctgggtagaatctagttcaattaactacactaaagatggttcagttaaaccacattcctttgatgactttattaataatcaacttaaagatcattccaaggttgaaatttatgcaactcctgacagtaagaatgctttaaactggtcaattcctaatggtgagacattcactgttgttaatggtcatgaagcaaaatctggtgatggcaagacttacattgaagtaacttacaaaggaaaaaatggatggctctgtgaagatgatattgatgacaaaaattcaaatattacatctgcagatgctgatacagataattccgctgatactgacaccaactacaacgcaaatgttgatcaatctaataaggaagtaactgttaagattggtccactttatgctgaaggatttggtgtaaatcctaacattgatagcgttaatactgttgatattagtggttacttcaaacatgatgatcaggatttaagcggtcagcaaagtgatggtagttttgttgctacacaagctgatattgatcaagctactgaaattggtaagaactatctaattgaacacagatatggtcatatgcaagttcaaacatcacttgattatcaagacatgtcagataatgatcaggactttactcaactaagtctttatgactatgtggatgttagttttcctgattatgaaattactgaaaaagctgaagttacagctacaacgtgggactgtttagcccacgtttttttaaatgtaactttaggtgatttgccaactagctatgaacacctacttgttcaagctagtgaagatagaactaatgaaaaaatcacttccacacgtcaagccattgccagatcaaatagttttattggtgctgttcaggaagctatgactttgcaaggtacatcccaaactcaagcatgggagaccttaatggcaaagttaggtaatgctcactataaaactgataaagctggcaagaagaccttagtacttgatgaatcagttaaagattttgctaaccacatgcaggaaatggttactaacatagataactttgataattttctgaagtctggtggtggcggaatgcttgaacctatttccagtgatggctctaccagttggaataacgtcatggcaattagagctaaaaacaatgatggttcttatatggaatttaatggcttaggttttaatttccatgatatttatggcaatccacatgctttgtttggtattgatgattcaagtggtgaagtaactggcaatttctttgttgatcaagctcatatccctattttggatgcatcacacattaagactgatacaattacaagtttgggaactattaacggtgttttacacgttgaaaaccatggcatttcaattgcggttggagatgccactaatttactaaatcctagtcaggaaattggtggtttgagtttagattctccaaattatactttgaatttgggatctggatcagtaaatattcatgataaaaatagtggtgctattacacacattggacctaatcaagcacagattggtggtaggaatgttgttgtaacaagcagtgatcaacctgtattaggttcatggattaagcaatattggcgaggaccaagtaagtattgggatttataaaaatgaatacattagaacaatttgtagcaaatgaattgggaactgttattgcaaaccaatccattaaaatagcgaaactagaaaaagaaaatcaaagtttaaggttaagaaatactcaacttcaagaaattcacagaaagaaggtgaaagagagtgagtctaagaccgataacattaaaaacggataaatcaataacccccgtgtcagacgacacgagggttttacgttctactgaaaaaggtttagtgctggacgtaacaattttaaatgaagatgattctccctatgatttaactgataaggatgtttcattttcagaaatcaaagagagtgatcgtgtagttgctgatgatggtactggtgagcaaagtggtaaattcaacatgattgatcgaactaaaggacactttagttatcaaatgactcaccaatgttatacagccagtggcacttgtttctttcaaattaagcaaggcgacactattgttgatactacacaagatttctattttcaagttaaagttgatccaactgttaagcctatcaatgatagttatgtaagtagtcttattgctatggaaaaccacctgctaggtgctactcaaaaaacacaagctactattgatcaattgaataaagattcaagtaatgcacaacaacaagcacaagcagtacttactaagattaacagtgattttactgattactctattaaatacaataaattatctagtgattggactgctgaagctaaatcaattcaagacgctgcaaatcagcaattagctaatcttaaaaccagtaatcaagctgacataactgcagctgttaagtcaattactgatcaacgtgatgctgctttaaaacagttaaacgatgataagactaaagcacttgctgatttacaggcagactacaacgcatggaagacttccacagttaaagatttcaatgatactgttcagccacttaaagacagcattagtgaaaatgaccaaaaacttactactgtaagtaagcaagtttctgatactgtagtgtcaatggattccttgaaacaacagtttgacaaggtagacttttccaagtttgttacaggggacaccattaaaaattactacactaaggaagaaactgatttaagactacaacaagctggtaaggtaaaatctgtagataatattcaacctgattcaaacggaaatattaatacagaccactacactaaggatcaagcaaatcaaaaacttgccactaagctgtcgtttgtcaagagtgacagccctcaagcggcttatgaagcaagttttaaaccagcagcagatggttcaccagtcattgcaatttatgacatgaatgatgagcctggcgaagctgttattgctggtcaaaaagttacaatcagtactttaaatgacgctattaaggctcttcaaactcaagtgagtggcttaagtggtttgcaaagcgctgtggacggtaaagccgataaagcaacggtatttttaaagactgatgcagacagcttaaagaatcagcttgaatctgaaattagcaacgctggtaagcttaaaactatcactgtaaacggtggcgcaaagataagccctgatgatagtggcaatgctaatatcactgttgatttatcaagcaaggttaaccaaacggatctgaataacactaacaacagagttacagcaattgaaacaggatatatgaaaaagcctaccgtaattagtaaagctgactacgataagcttgctactaaagatccaaatacgttgtatgaaataacagaataaagaaggtgaccgtatggctttaacgataaatggcaaaaaagttctaggttatgctctaggtgaaaatgagtttcttaatggaaatggagcagaaaacctaaatattttttatattggtggtgataataacagtgaatggaaccatcaatcttttactattgatatgacaaaatattttagtcaagctgatgtaaagtattcggatgttcaatattaccaaattattgtaaaggtattttatcaagatgctgacaataatactcttgaaaacaattttcgcacaccgttattgaaacgcggtgaaataaataacaagcgaagtgataatgaaggcagtcccggagctatgtcagtttggtttacggacaacaccacattagctgtccgtacaaaatccgattatgacgacactttaggctattcatatactaatctggtattggcggtgtatggctttacttctcaagatgtaggtgctggtctatagatggcagcacccaatagatattcatcgaagaattaaagctgtcgttcatgataaacgacagcgtacttaagcgatacattcgcttattttttatatcttagaaaggagtttttatatggctaatatttttgcacctggtggtcaagaattggcattagcaaaagacattgttcgacctaatttgcttgctaattctaaaaaatgtgagataagaacaccagcaggaaatatacagtttggcaaattcattaccctaaaccctaataatttaggatcaatatatttaactgatgcagcttcaaataaaggtattcacaaagacgcaactacttatttgccaatagagcaaaacacatattatgctcaaacactatggtttaccacagatgctcaagttattcttagtaattttgcttcaaattacatcttttactcttcaaatggctctcgatatctcttgtcaggcgtagaagcacatcaaattgttggcaatcaatataaagtatctggttattttaattccaagacaaatagcgactttaatcttggctatattggcaatttttctcaatgtttgaaaatcgcatcaactgctcaggttagatttgatgctttaaaagtagaaaaaggtactgaatcaacagactggtgtcctgcctatgatgattatgtaatgcaatctgatttagatgatcttaaaacacaaattgagcaattaaaatcaaaataattgaagcccacgatggctattttttatgcaaaaagcatagttaattaacactgtcgttgatattgaacgacatacttatttaaagaaaggaaaataaaatggcagaattaaatgaaaatacattttggatctctggaattattaatggagaatacagagagtgtgatggtccatataccaccacaaaggatatgagtgataaaggctatccttatgtaactaaaactccaaatccaaactttacacatcaaaagtatgactacacagctcatgaatgggtagacacttcagatgatgctttacttcacactgtggaagatgtaaaagaggctgttactgaattaaaatcaaacagtcagtcaaatactcaatcaaatgatcaacttgataagaaattagataagcttactactttggtcattatgtcaaatgttcaagtaggtgaaattagaaaagaattacaagcggttaaggctcaaaaccagtctgcagctgctactcaacctactgaaccaacacaaaacaccacaccagaagttgaaggaggtaataagtaatgtttgagatttacaagtttgaatttgataacgattttatcagtcaagatgaattaagaagttacattgatatgggcttaattactcaagctgaataccaagaaatcgttggtggtagcaatgaagaagctaaaccagtggaaggctaaattaacaattagaaattgtgaactgctaattggtctttttattttaggtaaaggtgtttggctgtttcatgatagccattatttcatttatcctccacagtttgagaatattgaaaacagcagatacattgactgcttcctaattttgttaggaatcttgttaatgctatctgcatttttagttccgtatattaacaatattaaatacaaaattatgctaattattgctagtaaagtatttcttgtaatagttggtattgtttgtatggttttagcattattgcaattaacgcatggcatctttactccattctatcgaatggggcattcagcatggggagatctgataatctttggatttgtttatctaactgcttgtgatgcctgaaagtgggtgtcatgagtgaattggggatacattattacagcaattggtggtgtgatcagtgcaataactctgttttataaagcatttgatagtagcaagcaacaatcactcaccacactgctacagcaaaaggatgaagaaattaagcagaaagaacaggatgctgaaatctacagaaaaaaatggctagatgccgaaaaagacaatgatgaattaagaaagaagttaaaaaatgacaattagagactggttatatttaggaattacaattgctagttatgtaattgcaattatcgcaggtgtttacgctagaaataaagctaaaattaacaaggcaactacagcaggcaaggcacttgatgtagtaggacaacttgcaacctatgcagttcatgaagcagaacacacaggtatgggaaacgaacagaaacgtgaatttgctagtcaagtgattgtacaaggtttaaattatttaggtattaaaaacgttactgcaaacgtaattaacggtgcgattgaaaaagcagtaaatgctatgcacttagctaacatggaagacagcgatgaaattactgttgctcctgtacctgataatgaaattctgaaacccactgatcaattgactgctcctgaaaatcaaccacagggagatgttaataatggttaggtattttggcgtggatgtagcagtatatcaacccactagcatgtcaaattacattagccatggtgctaaattcgtgattgcaaagttaagtgaaggcttaagttactttaatcctaaggcacatgctcaagttaagagcacacatgctaaccatgcttacttacatgcttatcactttgcgacttttagcaattcggtttcacgtgctaaaaaagaagctaaattctttgtgcaccgtgctgaaattgaaggtattagtaagaaacggtatctatggttagattgggaagttggcgatggtaatgtagttactagatcagttccatcaaatactgctgcaattattgcatttatggacgtttgccacaatgcaggttataaggttggattgtattcaggtgctagtgttttacgtaataacattgatactaaaaaagtgattaagcgttttggtaattgcttatgggtagcttcttatgcaactatgggcagaattgatacacctgactttaattactttccatcaatggaaggcgtagcaatttggcaatttactgataactggcgtggtcttaacgtagatggcaatattagtctaattgatttacattcagaaaagaaaacaaatcagccgactaatcctaagccaattacaaagcctaaagagaaaatacctaaaattgtatttgttcctattattaacaacaatccaaactataaagtaagattgctagatagtaatgggcattatcaagataaatacattcccactaactcaaattggaaagtatgggatgtaaaaacaattaaaaatgtgaaatactataagattggtactgataagcaatgggtaccggctaaattctgcaaagtataaaaaaagaaggaagtgaaaaattcctctctaaatctatcaagaaagccactctggacattgtgtctggggtggcttttttgcgttataatataagtgttgtaaatgttattttgctaagagaaaaacaacgataatgtcagctaaaaccactttgaattaattttcaaggtggtttttgttcacttaataatattttgtgctacaatatagttgttcttttgatagagaaagcgcgaagctttttcgtttttaatccttaagcaagaccacagtgagagctgtggtcttttgtgttataataactgtgttgagtttattaattgtctataaaagcaagaacattaccctgaagatagctgttaaaggctatcttatttttatagaaaggtttaaccatgaaatttgtagtagtaactacattccattatggtgatcataaaatgtatgatgatgctagattaatgaatgcactagatacaatgagctttgagtggattgaagctcaaaaattctggggatcattagtactagatacttataacattgactataaaccagaagacaagatagcagtcattgaattaaaagacattagccaattagcattattagctgaagtagaaaatgataaaatctacattgattatgataagcatgtgattgtacctgcttactatgcagttgatgattaaacgtgtatactatagctactgcagtaattgtctctatagacttctaggtaattactggctatatgaaatttcagattaagcatctaaggtttgtcacttagatgcttttttagtaaaaatgctgttgcacaaatgttgcacaacagcatattagagtaaaaaaagaccttgttagaatattgatctaacaaggttttggttattaggcacgagtaactttaccagactttaaagccttggttgaaacccatacgcgctttggcttaccgtcaacaagaatgcgaactttttgaaggtttggcttccaagcacgacgagttgagttcaatgagtgtgaacgtttgttaccgaatgtagtcttcttacctgttacgtaatcttttgccatttgctaaacctcctttaattgtgatgtcatacttaattagattatcatatgttttcgcgcaattcaatactaaaaggattttttcaggtgtattttaattattgattatgtcgttactatgataaaataataaacgtatatatagataataagacggaggacgaaacatggctgttaagatcaagacaaaagatggtttgattgatatttcaaacggtgtaatcgcaactgttgttggtggcgcagctacgtctaactatggcgttgtaggtatggcattaaagaatgccattcgcgatggatttgacgggattcttaatcgtgccaattataagcgcggtgttgttgtcaagtcagaagataacgaaattacggttgatgtgtacattattgttggttatggtttgaagatttctgaagtaagtaagaatgttcaagatagtgttaagttcaatttgaagaatcaattaggaatagacactaaggccgttaatgtcattgtacaaagcgttaaggtacttgacgaataacacaggcggaggttttaaatagtggttttaaatgagatagatagtaagcaatttagagatatggtacgtgttgccactcatcgaattggtaaaaatgcggagtttgttaactctttgaatgttttcccagttcctgatggtgatactggtactaatatgaacttaaccattgaaagtggtgctaaggctgtttcggaaaatccaagtactagtgttagtgatttaactgaaagcttggctaaaggtatgctaatgggtgcccgtggtaacagtggggttatcacttcacaattattccgtggcttttacaaggctacccaagggatgaagaccttaactgcacaggaattagcaaatgctttttcaaatggtgttgctactgcttataaggctgtaatgaagccagttgaaggtactattcttactgtagctcgtgttgctgcacaagccggtgctactaaggccaataacaccgacgatgtaactgaagtaatgaaagctgtagttgaaggtgctaagaaggctcttaagtcaactccagatttattgcctgttttgaagcaagttggtgtagttgactcaggtggtcaaggccttttgtttatctatgaaggctttttggaaggcttaatgggtgaaaactttgcagatcaatatcaacctgacgaaaatgaaatggatgaaatgatcaatgcaatgcaccaccaatcttcagttcaaagccaattggctactcaagatattaaaaatggttactgtactgaaatcatggttgatcttgatgccgatgtgccaaataaaaagaagtttgatttggaagaatttagaaagcacttgtctggcttgggcgattcattattagctgtttctgatggtgaaattgctaaggttcacgttcatactgaacaccctggtgatgttttccaatacggtagtcagtttggtcaattaggcaagatcaagattgataacatgagaatccaacacgaaagcatcgttgaccaagatgaagaacaacaagaagcagttgattttgcagtgatcgcagttgcttcaggtaacggtattcgtaagttgtttgaaagtgaaggggtaaaccgtattatctcgggtgggcaaacgatgaacccatcaactcaagactttattgatgcaatcaagaagtctggtgcgaagaaagctattgtcttgccaaacaacggtaatattgttatggctgctaagcaggctgctgaagttagtgatattccggttggtattgtaccaactaagactatttctcagggtttaaccgcaatgctttcattcaatccagatgcatctgttgatgaaaatgtggaagctatgacagaggacttagatacggttgtttcaggtgaagttactcaagctacccgtgatactgaaatcgatgaagtagaaattcataagaatgactacttgggaattgttgatggcaagattaaggttgacaatgctgatttaattaagactactgttgatatgattgaaaagatgctggatgaagattcagaaattatcacaattatgtttggccgtgatgctagtgaagagcaagcacaagaagtagttgaacaacttgaagccaaacatgatgatcttgaatttgaaattcatgatggtggtcaacctgtatatcacttcttagtatcagttgaataacaatgattgataatgcattatttgctcctgtcacagacttaaagggtgtagggacaaagactacagctgcattaggaagcttaggcatctatagtatttatgatttgcttttttactttccttttcgttatgacgaattacaaacattaccgttagatcaaatcatggatggtcaaaaagtaatgctaaagggaatagtagccactgaagcgtttgttagtcgttttggctataagaaaacgcgcttaagtttcaagatgagaattgaccatgatgtgatcatggtcaatttttttaatcagccgtggttaaaaaataaaattgagatcggacaagaagtagctatttatggtaaatacaatgttgcccggcaaagtttaacggcctttaaattcgtagcagccaaagaaaatgatagtggtatggcgccgatttatccggttaatcgacatgttaagcaaaaaaaattagtagatctaattaatgtggctattgacgattttattgatcaagtgcaggatattgtttcggaaaagttgcggcaagaatatcgtcttttaaaagaccaagtaattattgaaaaaatgcaccaccctaagaatagtcatgaggctgaactagctaagagaagtgcgatttttcgtgagttttttatttttgaattacaattagctttattgacccgtaatgatggtaaacaaatgggttatgcaaagaaatacgatctgacagaaattgctcaattaactaaatctctgccatttgaattatcagatgatcaaaagcatgtggttaatgaaatctttgctgatatgcattctgatggtcaaatgcggcgacttttgcagggtgatgttggttctggaaaaactgttgtagccgtttatgcgatttttgcagccattacagctggctatcaggcggctttgatggtgccaacagaaattctggcaactcagcatttcaaaaaaatcgatgaattgttgcgtcctttaggtgtgcgagtagctcttttaacaggcaatacaaaaacactggagcggtgtgagatctaccgtgaattaactgatggcacgattaatgtggtaattggcactcatgctttaattcaagatagtgttatctttaaaaaattaggtctagtcattattgatgagcagcaccgctttggtgtaggtcaaaggcaagctttgattaataaaggcgatcaaccagatattttggcaatgaccgctacgccaatcccgcggacgctggctttgacagtttatggtgatatgacagtctctgaaatacatcatttaccagccggaagaaagccaattatttccacatggaaaacaagtagtcaaatgaaggaagtctatcgacaaatgcaagagcagctaaatcaaggctttcagatttacgctgtgacaccattgattaccgagtcagagacgttagacttaaaaaatgcagaagaattgcatgaaaaattaagccatgattttcctaatcacaaggtagtcctgcttcatggtcaaatgccaggtgcgcaaaaagatgagattatgactgcatttgcagctggtgagatcgatattttagtaactaccagtgtgattgaagttggagttgatgtggctaatgccaatatgatggtgatttataatgctgatcgttttggcttaagtcaattgcaccaactgcgtggtcgaattggtcgaggacaaacacaaagttattgtgtctttctagctgatcctaagaccgattcaggtaaagcaagaatgaaaattattgcgtcgaccaatgacggcttcaaattagctgaagaagatttaaagatgcgcggtgaaggtgatttgtttggtaaggctcagtcaggattgccagaatttcgtgtgggtgatgtagtaaataactacaatacattggtcgttgcgcaaaaagaagcacgagctttggttgcggctgatcctgatttattagatccaggacataaggcacttaagcaagtgctagaatataagcaattagagcaaaacagaatttagaaaagattgtggtgaatatatgagaacaattgcaattgatgcgatgggtggcgaaaatgccccagatgcaatcgttaaggcggttttacaagctaaaactggaatgcctgagactaaatttttattatttggtgataaagaagcattaagaaaactaatccctgaagatcaaattaatgatcaattaggagttgtacctacaactgaagttattgctgatgaagatgaaccagttaaggcaatcagaaaaaagaaagactcttcaatggttgtggcagctaacttcgttaaggaaggaaaagctgatgcgttgctttccttaggcaatactggtgcattgcttgcttgtggaatttttattattggtcgaatcaaggggattgttcgtccaggtttgatgcctactttacctgttcaaaatagtgacgatggcttcaatatggttgatgttggtgctaatgctaagagtaagccagaatatcttttacaatgggccgaaatggcttcgtactatgctgagaagattcgcggcattaaaaatccgcgagtaatgctcttaaataatggagctgaaagcgacaagggtgatgatgttcaccaaaaggcctatgaattgcttaaagaaagtaatttgaatttcttaggtaatattgaaggtaatgaattgctattaggcaaggcagatgtggtagtaaccgatggctttaccggaaacgctgtacttaagaacattgaaggaacctctagcgtcttgcttcatttattaaaagatagtttattaaatggcggtgtaatgaccaagttaggtgccttaatggtgaagggctcgttatcaagcttaaaatctaaatttgatacggctaaatatggcggtgcagttttactaggcgttaatgcaccggtagttaaaacccacggtagatcaaatgaacgtccaatttatttcactcttaagcaagtagataaaatggttaaagaaaaacttgttgcagattttagagacgaattcgctgaaaaatagtacaatgttttattaaaaaggagaagttttatgtcagaagaagaaatttttaataaaattaaagacatgatcgctgataattttgatgttgataaggatgagatcactgaagacactaattttatgaacgatttggatgctgattcaattgatttggttgaatttatcttgcagctagaagatgaatttggcgcagaaattcctgatgatgaagctgaaaaaattaaaacaattggtgatgctgtttcatatattaagtctcatcaaggataattttctaaaaaaagccgtgtcgtgatttgcatacgaccggctttgtgtttataattagaaaataaatagaaaagattaaatgcttttaataaaaaagctcgagatggaggaatgacctttggagaagcagagtgatcttttattagatattcaacacctgcatacggcataccgtttgcaagggaaattctatgatgcggcagacgatgttaatctgactctgaagcgcgacgagattttagccatcgttggtgaatctggttgtggtaagagtacaattgcctcaagtatcattggattgtacgaccataaaaatactaaagtaacaggggacattctttacaatgaattaaacctagttggcttgaatgaatcacttttcaataagattcgtggggacaagatcggaatgatcttccaggacccattagccagcttgaacccattgatgcgtgttggtgatcaagttgctgaaactctttattaccacactgatatggacgaaaaggcacgtcacgcacgtgtcattgaattgtttaatcaagtaggaatgccaaagcctgaagaaatgtacgaaatgtacccacatgagttgtctggtgggcttcgtcagcgtgttgtaattgcgatggcgattgcatgtaagcctgaagttattattgccgatgaaccaacaacagctttggatgttactattcaaactcaaattttggatttgcttgaagatattcaaaaacaatctcactcagggattattttgatcactcacgacttaggtgttgtagcagaaactgctgatgaagttgcagtcatgtatgctggtcaaattgttgaaaaatctgatgtaaagacaatttttgaaaacccacttcatccatatactcgatcattacttaactcaatgcctcaatcagacgatacggatgaagatcttcatgtaattcacggtactgtgccatctttgaagaatatgccacgtactggtgatagatttgctgcaagaattccttggattcctgctagcgcacatgaagaagaacctaaggtgcatgaagttgcgccaggtcactgggtaagatgtacttgctggaagtcattccactttgaggatgaaaagacagcaagtggggagtagtttatggcaaaagaaattattcaaatcaaagatttaaaggtctattacccaattcgctctggattttggaacagaattactgattatgtacgtgccgttgatgggattaatttttcaattggtgaaggtgaaacttacggtttaatcggtgaatctggttctggtaaatctactaccggtaaggcgattgttggggttgaaaaagttacaagtggtcaaatcatgtataagggtttggacgtaactaaggcaagcaaccgtaagaagcttgattataataaagatgttcaaatgatcttccaggattcaatgtcaagtttgaacccaagaaagagaattgaagatatcattgcagagccaattagaaactttgaaaatctgactactgatcaagaacgtgatcgtgttcaagaattgttggatattgtagggatgcctagtgatgcgatctacaagtacccacatgaattctcaggtggtcagcgtcagagaatcggtgttgctcgtgccgttgctactaaccctaagttaattgttgcggatgaaccaacgtctgctttggacttgtcagttcaagcacaggttttgaacttcatgaagcacattcaacaacaatacaacattgcttacttgttcatttcacacgacttgggtgttgttaagcacatgtcagaaaacttggcaatcatgcaccgtggtcgtttggttgaattaggtagccgtgaagaaatctacaagcacccaattcacatctatactaagcgtttgctttccgctattcctcaagttgatgttgaacatcgtgaagaacacaagaaacatcgcgaacaagttgaaaaagaatttgaagaaaatcaaagtaaatggtacgacaaggatggtcgtgtatatccattacaacaagtagcacctaagcactgggtagctttgccaaaagatatggcccacgaagctaaacttgaagaattagaagaaaaggagagtgattaagcatgtggaaaacgattttacggcgtttgttaatcatgatccctcaattgattatcttgagtttgctggtcttccttttggctaaaatgatgcctggtgacccattcagtggatcaattaaccctaacaccgaccctaaacaaattgaagccttaaaacgggctgcaggtctgtttgatccatggtacgtgcaatactttagatgggtgggcaacttgttccatggtgaccttggtacaagttacattcaacatgtgccagtaacttcattgattgctgaccgtgctaacaacaccttctggttatcacttttaactactattttgacttatagtattgctatccctcttggtattacttcaggtcgtcaccaagacgaatggcaagatactagtgttagaatttttaactacatcaccttggctaccccaggattcgtattctacatcttaggtttgtggctcttcggtttcaccttgggttggttcccaatttctggttctgtttcagctagtgcctctggtttctggggcgtacttggcagtagaatctatcacatgattttgccagcaattctgtatgccttgattactactactggtactgttcagtacttaagaactgggattgttgataacaaggttgaagattacgtaagaactgctcgtagtaagggtgttccagaaagcgtcgtcttccataagcacattttgcgtaactcattattgccaatcgctgccttcttaggtaacacgattaccggtcttcttagtggttcaatgatcattgaaagtgtatttagttatcctggtatgggtaagttgttccttgactcaattgggcaacgtgactacactaccttgactgccttgattcttatctttggtatcttaactttaatcggtaacttattatcagatatcatcatgagtatcattgacccacgtattagaattcaataggaaggagagaaaaaatggctgataagaaagaaaaagctacaaagaaagctactaaaaaagacgaaaagcaaaaagcaactctcccaccttctggattcaaggtggcaatgcgtgaaattgtgcgttcaaagtctgctttaactgctctgattatcattattgtcattttactgtttacttttggaggttcattattcttgaatcgtgcccaagtaacagaaatgaatattgctgactcatactatggttggggtgaagcgggccacttgctaggtacggatgatggtggtcgtgatatcttgaagttgctcatcatgggtgggcgtaactcaatcatgatcggtatctcagtaactgtaattactgaaatagttggtttagtagttggtttggtatcaggctactttggtggtgcaatcgactcagttatcatgagagttgttgacttcattcagattttgccacaaatgccaattattattgttttgactactgttatccctaactacaatgctgtaactttggtattcttgattgcgatgtttgggtggacaacgacggcacgttacttccgttccttcgtcttatcacagcgtggtcgtgactatgttttagcatctaagacttcaggttcatctaatttacaaattatgttccgtgaagttttgccaaacattacttcaatgattattatcgacgttgtattgagtattgcaggtaacattggtattgaaactagtctttcattcttgaactatggtttaccaagtaccacgccatcacttggtactttgattggttttgctaatgacccagttaacgttattaaccgtccatggttgtggttgccagctactatcttgcttttggtaatttccttaagtattaactatgttggtcaagccttacaacgtgctggtgacgcaagacaacgtgaaaactaataaagtaataattaaattaaaacagctctatcgcttggtagagctgtttttgcatatttataactagaatcttattgaaagcaaataaaataaaaattaaaaataatttcataaaactattgaatttttaatttatggtggtattatttaatcatcaacctgattcaaataactattgaaaatgaattgtatcctagatgggggaaacaaagtatgaaattatcaaaagtattgggttcagtaggagtcgtttctgcggcagcgttagctttagttgcttgtggtaagagtagcagtaacaatgctggcgcaaaggatgccaagaagtttaaggaaactactccagttaaggcagtcaaaaagggcggcactttatcatatgctgaagaaactgatacaccttttacaggtatttttaacaatgaattatcaacttctgctattgacacagatgtagcacagtttggtaatgaatcattatttgatactgatgacagttacaagattaatagcaagggacctgcaacttttaagttggaccgtaaagctaagactatcactaagtgtataattttttacggtaagttgaataaataattaaaaaagcccaagtcctttgaatttggacttgagctcaaacaaaaagaccagtagtctgatgttaagaacaaaaaacacattagaagctggtcttttatgaattcaattgtaactgaaatcgcaaatattataaagtctgaagataattatattaagcgtgaaagaaaaataatctgtttcttcttaaacctgattaaggaaatcatggccttggctttagctaaagttgatgatgaaatgattaccaaggttaaagcacagggctatcagattgataagaagaatgagcgctcaatcaatatggcttttggcgaagttaggtatgtcagaagaagatatgtctgcccaggcaaacaagcaaggtatcccttggatgaattaatgggctttgacaaatacaagcgctacagtattttagcagtcaaaaacatcttagaagtaagcagcgttgccacttatcgcaatactgctctagcagtcaattgcctgtctggctttaatattagccatatgcaggtgggcaatttggtaaaaatggccgggaaaaatattaaagcgggccaagaagcagattcaagatatgatgccgcaggcactaagaaaaaggtcccagttttgtatcttgaaggcgatggcgtggtgatcaaaggcactaaaagccggttggaatttcatcgctatcaggtctgtgaaggcattgtcaatataagcaagaaacgcagaaagcgaatcaatgccaaggaatttgtttctttaagccgacttgatgcgctgaacgaagccaaggagtacctggccaatacttatgatctttctgatactgtaattcttagcaacgccgatggcggtgctggatatgccaaaacagacttcgatgacattgtagggctatgcaagcgtcatgagcatttcttggatgtctttcacctaaataagaaaatcaaagaaaggctatattttgcgcctgacctgcaaggcaagctgatttctgctttggaatacaaatacagctatgacaaagttaaaactatcctaaccactgcagaaagccgactaattgatgaattgaataccgagctcaatcatgattatctggggcgcctaaggaattatattgatcgtcattgggacgatattaagccgtttaagaaacgaaaactgactgtgactaaagccattggctgctgcgagagcaaccaccgcaagtatacctaccgtgttaaggggcaaggcaagaaatggtcaaaatctggagcagaaggcatgcttaggatcttaagctgcatcaagaatcgagagctggaattttggcttagcagcgagtttgaagattcagaaataactgtattgactgaacaggaattaaaagcagcggcccgtgacagcttaaagaagcgtcatgaagttcatttaggcatccagcatggcgcattaaccgcacaggtagctggcaatagttatttaagcaagctaagcagaaatttaagtcatataaatatttaagaaattaaggttagactaatggtttaaaggctaccgcaaaaacattgacacttacagactatcactattgaagttaaaaaaggtgttaagtggtaagatggtaagcaggttactgcaaaagatgtagagtatgaatatgaagttatggctaacaagggcacaaagtctcaacgttatactgcttcacttcaaaacattgttggtgtaactgaatatcatgatggcaaagctaagactatttcaggtattgatatgccagatggagcaaatggacgtaaagttgtaattcactttaaggaaatgaaacctgggatgcttcaatcaggtaacggatacttcctcgaaaccgcaagtccatatcatcaattaaagagtattccatttaataagcttgaatcatcagatgctgttcgtaagaatcctttgttctttgggccatacaagattagtaaaattgttcgtggtcaatcagtaacttgggttcctaataaatactactggagaggtactccaaaattagataaaattacggtatctgtagttaaccctaactctgcttctcaagctattaagagtcacaaatttgatattgctagagttgttaattcacaatggcaacaggttaagaacactaaaggtgttaactttgttgctaaagtaccacttcaatacagctacatgggcttcaaggttggtaagtgggaaaatggtaagaatgtcatgaacccaaaggcaaagatgaacaataagtcacttcgtcaagcaatggcctatgcaatgaacattgatgctgtggaaaagcgttatactcaaggcttaacattcagagtacctactttaattcctgaacaatttggaaattactttgacaaaaatattaagggatacaattataaccttaaaaaggctaataagttacttgatgacgctggctacaagaagaaaggtaagtatcgtgttcaaccaaatggtaagcctttgaccattcaccttgcagctatgtctggtagttctactgctgaaccaattactcagaactacattcaacaatggaagaagatcggcttgaatgttaagttaacaactggtcgtctaattgaattcaattcattctatgataaagttcaacatgactctaaagacgttgatgtattcatggctggttggtcactatctagcgaaccttctcctaacgatctttacaatgaaaaggcaccatttaactacactcgtttcgtaactaagaagaatactcagcttcttaaggacattgactcacaaaaggcatttaataataaatacagagtacaaaaattccacgaatggcagaagtatatgtttgatgaagcatatgttgtgccaacagttaatgcataccaaattgacgctgtgaatagtaagcttactggctactcacttaagccttcagatgctaactcagtttggtacaatgttggttacgctaagtaattcattaatcattagtaaaactaaactccaaaattctaaacataaacaaattccttatattaaattctaataactaactaatagaaaagacaggtatcttaatccaaatacctgtctttttcatgctattgttatgtttttgtaatagtgataaaattaaaggatcaacttgctccaagtaatggaggaattttactaatgaaaaaggcaaaactttttgctggtattacactgttatcaggtgtagctcttaccttagctgcctgtggtaagtcagaatctcattctgatgaatcaaagactgcttctaagtttaaggaagctgttcctactaaggctactaagaatggcggtactgttaaggttgctgttgaagctgataccccatttactggtatcttcaacgacgaactttcaacttcagctactgatactgaagttatgcaatatggtgcagaatcactttttggtactgatgatcactatgttttcaatgataaaggtgctgcaacaattaaggttgaccaaaaagctaagaccgtaactgttgaaattaagaagggtgttaagtggtcagatggtaagcaagttactgccaaggactatgaatacgcttatgaaattattgctaacaaagacactaagtcacaacgttacacttcaagtttagctgatttggaaggcttacaagaataccatgaaggtaagtcaaagactatctcaggctttgaaatgccagatggtgaaaacggccgtaaagcagttcttcactttaagacgatgaaacctggtatgaacacttcaggtaatggttacatttgggaagctgctgctccttaccactacttgaaagatgttaaattcaaggacttaatgtcaagtgataagatccgtaagaagccattgttctttggtgcttacaagttgcaaaaggttgttcgtggtcaatcagtaacttgggttcctaacgaatactactacaagggtaagccaaagctttcaaagattactgctacagtaattaaccctaactcagttgctcaaagtattaagtccagaaaatttgacgttactcaagtaatcaactcacaatggaagaacatcaaggatactaagggcgttaactttatcgctaaaattccactacaatactcatacttaggctttaaggttggtaagtgggatgccaagaagggcgaaaacgtaatggacaagaattctaagatgaataacaaggccttacgtcaagctattggttatggtatgaatgttaaccaagtttacaagcgctactcattcggtttatcattcagaattccaactttaattcctaagcaattcggtgattacttcgacaagaacatcaagggttacacttacaatatcaagaagggtaacgaaatcttggacaaggctggctacaagaagaagggtacttaccgtgtacaacctaatggcaagcctttaactattcgtttagctgctatgactggtagttcaacagcagaaccaatcgttcaaaactacatccaacaatggaagaagatgggcttgaacgttaagttaactagtggtcgtttaatcgaattcaattcattctacgacaaggttcaaaacgatgatccatcagtagatatgtttattggtgcatggtcattatcaagtgaaccatcacctaatgacttgtatagcgaaaaggctccaatgaactactcacgtttcgtaactcctgaaaacaccaagttacttgacgaaatggattcacagaaggccttcaaccacaagtacagagttgaaaaattccaagaatggcaaaagtacatgtttgatgaagcttacgtaattcctatagctaatagttactcaattactgccgttaacaagaagcttactggttactcacttaagccatcggattcaatgggtaatggtttccctaactggtacaatgttgcttacgctaagtaaagcaattatttaaaattacaaaagactgtttctaaattttagaagcagtcttttttctgtgacccgaaaactggtataatttataggtataaaaaggggcatttttatggtaagtacaaagtttttaaaaaaattaaaagacgattataatatcgaatttaacaatgaaaagctattagaagaagcatttacgcattcttcatattcaaatgaacatcccaatgatggaattcgcgattatgaaaaactcgaatttcttggtgatgctgtgctagaattagccgtttcgaattatgtttatcttcattatcctaagttgaatgaaggtgaattaactcgtttgagatctaatattgtccgaactgaaggattttcagaattcgccattgaatgtggttttcaagatgagattcacttgggcaatggtgaagaaaaagctggagcacgacaccgcaaaactttactggaagacgtgtttgaagctttcaatggggcacttttccttgatcaagggatgccagcagttgaacattttttgcatttaacagtttatccattgattgataagggtgaattcgatgattcacgcgactataagacagacttgcaggaagtattgcagcaagatggtcctgtgaatatcgaatacaccgttattagtgaatctcaattaccttcacactttgttgttgaactaaaaattaacggaaaagttgaatcaaaaggtgagggtcacaataagaaagcagctgaacaacaagctgctaaggtcgctttacaaaaattagaaaaataaggggatgaaaaagtgccattaacagaattagtgctcgatggttttaaatcattcgctgataagacaactattcattttgatgatggaattactggaatcgttggtcctaatggttcggggaaaagtaacattactgaagccgtacgttgggtaatgggtgaatccagtgctaagtcactacgtggaacgaatatgaaggatgtcatctttgccggtagtcaatttcgcaagccgctcaataaggcggaagttactttagtttttgataataaagagcgtgagttggcttttgattcagatcaggtctcaattactagaagatttctgcgatcaggtgacagtgaatttttaattaataatcagcaagtgcggatgcgagatgtgcggacactctttcttgattctggaatttcacctaatagcctagcaattatttctcagggtcgagttgatcagatcttaaattctcgtcctgaacaaagaagagtaatctttgaagaagctgctggtgttttgcattttaaacaacaaaaagaagctgccaaggcgcaaatggagaaaaccaaggataatttaattagaatcaatgacttggttaaagaacttgaaggtcgattggagccgctgcatgagcaaagttcgctggctaaagaatatcaatttcaaaagaagggactagatcagaaattaaaaagtctattagcttttgaaattgaggatttaaaccggcaaaaagaagaagtccaaaaagcagcagataggaaccaaatcctgttaacaaaactggataatgaagtaaaaggttcgcaaagtgctgtttctgaaaaacgggcagaatatcaaaaaattcaaaatgagcgagagcaaacgcagagtgaattattaaagctaagtgaccaattatcacagatcaatactaacttgcaggtcgcacagcaatcacaacagtttaataattcaactagggtagaaactcaacgtcaagttgaagaattgaaaaatagcttggttaagctaaaggatgaattgtctgaactgcagcggaataaaaagcaacttaagcaggagcaagatgctttacaagagcagcatgatcaattgactggtaaattgcacgatgatccagaagaattgagtaagcgactagaagattgtcgtaacgactatattcaacttttacaagatcaggctacaactaataatcagattgttaatctgaatactgaattaaaacgtagtcaggcagacactacttatcaaaatagtgatgtaagcaagcagctaaccgatgctcggactgaactggaaaagctgagaactgaaggcaagcagctgacagttaagcggcaaaaggaaaaagaaaaatttgcgcaagttaatgatcaaaataatgatttaactaaacagattaatcagattcggcaagccgttaacgcagagcgcagtaaattagagaaagttgaagcgcgacatgaagctttagtaaatattcaaaagcggcatgagggttattactacggtgtacgtaatgttttgaatcatctatctgatttccctggtgtgatcggggctgtgggtgaattgattacatttccagttgagctagaagctgcaatgacgacagctcttggcggtggcgtacaggatttgattactgaaagcagagttagtgctagggatgcaattaatcaattaaagcgtagtcgtagtggacgagctacttttttaccattagatggcttgcgtcaatatactattccacagtcaactatcactactttgcaatcttttagtggctttaagggcgtagcaagtgatttagttgaaagtaaagccgatcaagatattactgctgcgattaattatttgctgggtagtgtgattatcgttgatacgattgatagtgcaatgtcaatttcacgtcgagttaaccgctatcggattgttaccttagatggcgatgtgatttccccaggtggttcgatgactggtggtcaaagaaaccaacgtaataattcaccactgcagacggcaactgaaattaatcagttagagaagcaattacagactttacgacaaaatttggctgaagatcaagaacggttagatgagctagttactcaaggtgaaaaagttgcggctaaattgcaacaactgcgtgatactttgcaggagactaatcaagcgattaatgaagctgctatttctttccaaaatcaagaaaaggaagtaaagcggctaactgatgctaatagtttatataaatctcgagtaaaagaacaacaagatcggattgctgctttaaagaaagaaatcactcaggctaatgatcagcaggaacaattggctaagcaaaatgaagtacaaaagggcaaaatgaatgacttgcaagaaaagattaagaacttcaatagcttaagtcaacgtgtacaagaggaattatcaaagcttgatcctcaaattgcagtttatactaataagttggaaaacttagctagtcaggaaaaagaaaaaaatattcagatcactaataatcagaagcaaactgatagcttagagcagaaattaactgaattaagtcaaaatggtgaattatcagttaaaaagaattctgatttacaaacacaaaaagctgaaattaagcaaaagaatgaaactctgcaaaagaagctgaatgaacttagtgcgcaattaggacaagttgatgcgcagattaatcaacttgaccaagttgccagtcgtaattatgatttacgcaaagatgcagcaattgaacaagaagattactcagtaaagattgcgaagtttaattccgcaattgatcagcgcttgtcaactttgagtgaagagtatgccttaacgtttgaagctgctttagagcaagcagaaggcgaaaatactgaagaaaagcgcaatgaactggctaaaagcgtgaagttgcatcacatgtcaattgaagatattggccaagtaaatcttgattctattcaagaatatgaagatgtgaaaaagcgctatgactttttgaatggtcagcaaaatgacctgttaaaagctcgtgatgaccttgaaaagtcaatgaacgagttagatgaagaagttaagacgcgcttcaagagtacctttaatcaagtagcatctagctttaagagtatttttccagttgtctttggtggcggtaaagctagattggaactcactgagcctaataatttgctagaaactggaattgagattatcgcacagccgcctggcaaaaagcagcaacgtttaagtctgctttctggtggtgaacgcgcgttaaccgcaattactttgttgtttgccatgttgcaggttaatccggtaccattttgtgtacttgatgaagtagaagctgccctggatgatgcaaacgttactcgttttgcgcaatttttgcttaaatacgatatgaaaacccaattcatcgtgatcacgcatagacgagggacgatgcggcaggctgaccaactatatggtgtggttatgcaagaatctggcgtttcgcaagtattgtcggtttcattaaaagaaatgaagaataaaaatgaggtgaaatagttgggtttatttgatcgaataaaaaaatcactctttggtaaaaaagacgaagaggatgaaaacaaaaaagaagaaaaacagactgagcaagaaaatgaagctaagactgaatcagaagataatgatcaagaatctgaaaaagtagttgatgaagctaaatcgaaaactgaaactactgatgaagaagaacaaacagtagaagcacaagaagactctgaggtagaagctgaatctggtgatgaagaaaaagcagtagatttagattctaaacaacagcctgaagaagttaaagtagaagagactactgagactgaaacagaagaacaagttgaagaaactgaagtttctgatgaggagccaacagaatcacaagaacagctttatgaaaaggggctagaaaagactaacaagggatttggtgcaagacttaacgccttttttgccaagtttagaacagttgatgaagatttcttcgatgatctagaagacttattaattgaatctgacgttggctatgaaactgctgaacaattaactaatgaattgcgtgaagaggctaaattgcaaaatgctaagtcacgtgatgacttgaagcgagtaatcgttgaaaagttggttgacctttacgataaaggtggcaatagcgaagatgagcaattgacgtataatgctgaagctaaacctaacgtttacctacttgttggtgttaatggtgcaggtaaaactactacaatcggtaagttagccaaacgttttaaggatgaaggaaagtcagtaattttagctgcggccgatacctttagagcgggtgccgttgaacagctagttgaatggggaaaacgtgttgacgtacccgtagttactggtaaagaaaaggctgatcctgcttctgttgtttatgatgcaactgaacgggcaatcagggaaaaagctgactatcttttagtcgatactgcgggacgcttacaaaataagaagaatttaatggctgaattggaaaaaattcaaagaacaatcaagaagcttttaccagatcagccaacagaaaccttgcttgtgttagatggttcaaccgggcaaaatgcgcttttgcaagccaaagactttgacaagaccaccgaattaactgggcttgttttaactaagttggacggctcatctaagggtggtgtagttctagctatccgtaacgaaatgaatttgccggttaaattggttggcttaggcgaaagagctgaagacttagctgattttgatgctgcaaattatgcgatcggtcttttccacggcttggtctagtgataaagttagagatgtaaatattgttttataaggagaattttatgaaagaatatagtgcttgtactactatcttagttggtaaaaatgcctcgattgatggcaccactatgattgctcgtaatgatgacacttttcgtccaattaccccacaaaagttcattattgagccagcccgtcatggtgaaaagaaacatattaagtcatggttaaacaagtttgaaatggacttgccagaagatgcgcaacgtgtaccagctgttcctaatgttgactacaagcatcgtggctactacgatgaaagtggaattaaccaagaaaacgttgcaatgtcatgtactgaatcaacttatggtaatgagagaactttagcatttgatccacttgttaaagatggattagatgaagactgcatgcagacttctgttttgccatacattcattcagctcgtgatggtgtacaatatttaggtaagttaattgctaagtacggttcaccagctggtaactcagttttattcagtgataaagatgaaatttggtacatggaaattgttacaggtcaccactgggtagccgagcgcattccagatgattgttacgctgcaactggtaatcgagttgcgattgaacaagttgactttgataatcctgattacttcatgtggagtaaaggtattcaagaatttgttgaagaacaccatttgaacccagatcatgaaggctggaacttccgtcatatttttggtacctatactgaacaagatcgtcactacaacaccaaccgtcaatggtatattcaaaaattgttcaatcccgaaattgaacaaaacccacaagatggcgatattccatttattcgtaaggcagctaagaagatcactaaggaagatattcaatttgctttaggttcacactaccaagataccccgtatgatccatttggtaagggtacggatgaagaaaaacatcgctaccgtccaatcggtttgaaccgtacgcaaaatgctcatattttgcaaattagaagtgatgttccagcagatcgtgcggctattatgtggttatgtatcggtggtccaactttcactccatttgtaccattctttgctaatatgaatgatactgatccttcatataacaatacctcaatggattacaatatgaatgatgcatggtggtattacaagtcatttgcagctatcgttgaaagtcattacccacaatttgttcagcttgatactacttatttaactgaacttaaccgctacttcagaggtcgagttgaagaaattattgctggtgcagaaggtaaatcaggtgatgaattaactgaatatttgactaaggaaaatcaaaagactgttgcccatactcgtaaggaaactgaaaagctttggggtcaaatgatgattgaatcgatcaacatgtccaaacttactttcaatatggatgaaaatctttaataaattcaaaacagctcgaaaaagggctgttttttataatatgtgaaatgaaaggaatatagacaatggcagaaggtactattggctcattttttactaagattaacaatgaagttgaaaaacaaatgaataacgatttaaaaaatttggtattaatgctaatgaattggaaatgcttattgaattaaatcatcatcagcatggcaaaacttttgaaaagttggctaaagaattgcatgtaactaatgacaaggtcaaatctttgacaaaaaaattggctgccaaagatttgtgcaagaaatttgaaaagcaccgtgcagaaactgaccaaactattacagggatgctcagtaaagatgaaactcttggcttggttaatgtactgaaaaagatgcttaagtcgagtgaagacaataagtaatgtaaaatagtagaactccagaagttaattacttttggagtttttttatgcaaaaattattgacaaatctttaatataatattactgtattaagtaaatagaacagtaatattattagtgaaaggataaaaatgtcagaaattttaagagtggatcaagtaactaagacttatggtaaaaaaggtgagaagcaataccaagctttaaaaggaattagctttgccattgaacaaggtgaattcgttggcattatgggtgcttctggttcaggaaagacaactttattgaatatcttgtcgacgttagataagccaactagtggacatgttttagtcaataagcaagacattactgcacttaagaacaatcaaatggcagattttcgcggaaaagaaattggctttatttttcaagatttcaacttgctagataatttgactaatcgcgagaatatagccttgccattatcgcttcaaggagtgaaggcaaaggatattgacggaaaagcaatggcgattgccaaaagattgggaatagaatctatcttggacaaatacccagctgaaatttctggtggtcaaaaacagcgtgttgcttcagctcgagcattggtccataatccggcaattttatatggtgatgaacctacaggagctttagattcacaatcagctacggaattattgaaaacaatggcagacttgaataagaatgatcaagtttcgattctgatggtaacgcatgatccttattcagcttcttacgctcaaagaattttgttcatcaaagatggaaaaatcggcaaagaaattaaaaaagaaaataagaccagagaagaattttatcaagatattattgctgaattaggtagacgttagagggaggtatagacgtgctttggaaattatcactaacagggctaaaaagtcgctttaaagattatgctgttttgttttcggggctaactctagctgctgcaatcttttatatgtttatgaccattgcaattaatccagcttttcttaagggttcaatggccattgccttttcaattacccagatggtctttatttttgggatagcgctattagctattattaccctagtctatattgtttacgcaaatagttttttgcttagtatgcgtaaaaaagattatggtacttatatgatcctaggagcgagaaatagtaaaattggccgtttaatttttacagagacggttgttattggtttactcgctactgcattaggaattttaattggtatcggcttgactcaagttgtttctcagttattaatctctcaactgggtttgcagctgcataaattcttaggcttttatttaccggctattttatggacagttgttttctttgtagttttatttttcttggctgcaatttggaatcggcacaaattggtaagtactagtgtaatcaagcttttgcatgaggatcaaaaaccagttaagttacgtaataaccgaatctggaaagcaactgaagtaattctaggccttgcccttctagccattggctactgggcaatgtgggattaccatcagttgcaaattaaatcggttgaaattggttttgtcactattttggctggttcatattttgtatttgattctgtatttactacagttatcaatgctttacggaaaaataaaaagtttaaatacagtaaactgcattcttttaccttaggtcagctaaaatttaggttaggtgattacaatagagttttaactgttatttccttgctttttgctctagcattaggtgcgatcactgttggattaaactttaataatatgacagagactgctcttcaggcaacatattatgatgctgtgttgtataaaagggatgctaaagttaatcaacaacttaaaaaagttgccgttagaaaacaaacgactttgaattataaggtcaatgggaaaaagaagtttcctgttctatatgttactgaccaagaaattgctaagaaaaaaatcaaattccaatctggtcgaaagaacggcgaccaaatgaattggaagacaaagacgattacagttgcaggtgtaaagaataaaaaacaagagatgaatttccaacttgctagtttaacaccttattctgattatgaggttaaagttgtaactccagctgaatatgtgaagattcctggaaaaaacaaacaagtaaccttgctattaatcaataactttagaagtaattttaataatattgaaaaattgcaaaagatgtcacttgaccagacagttactaaggatgcacaaggagtttatgtttctctgaataattctaaatctgctcaatatcgcttagtagcaagcgttgcgtcaggttttgaatttatgggcttcttcttaggcttagctttcttagctatgttagcttcaaccttaatgtttaaagtgctatcaggagcaaacagtgatcgtcctcgatatgaaatgttgtggaaggtcggatcaagacgtaagttattaaagagctcgattaaagcggagattggtaccttgttcgctttaccggctgtcttgggtgtgattgatgtattatttggactacaatttttcaaagggattttagctaatccatacgataaaatttggattccatttacgatctttttagtattgtatttgctttattacttaattacagtaaaactctatgaaggaattgtattgaaaaaataatggtacgaaaaaagatctgcaaaatgcagatctttttaactgtatttagattaattttatttattttgcttatttaaaattgaatgacgaacaccatagctaaagtaaatgattaagcctaaaataaaccaaataccagcataaaatttagcttggtagtcaagccctaagaagacaattaaagcagccatgaaacctaaagcaggtaaaactggataaaatggcatcttgaatgaaggatcatcaatgtcttttccttcacgtggacgcaacttataaatacctaaagaaacaaacataaaagcaattaaagtaccagctgaaaccaattgtgacaacatggagaaggggaaaaatgctccaagtaaaattgctacgattgttaatgtccataaagcattattaggtcgacgatctgcattcaacttgcccagccatttaggaagcatctcgtcacggccaaatgaatagatcaatcttgaaccggccatactcatcccaatcaaagcagtgaacatccctaaaacagcaatggtttggacaatgatggcaacaattggatgaccagcaaaccgtaaggctaaacccactggttcagcggaattagcatacttctgataaggcataattccaattaaaactaaactaactccgacaaataaagtaacagcaatagcaagtgagcctaaaatgctgcgaggcatagttttttgtggattaattgcctcagctgagttagcggcgattgaatcaaagccaatgtaagataagaaaatcattgaaacaccagcatagattccttgccagccaccgaatggaccgttagcagtcatcttgtatttcggtataaatggggtgaagttaacttttttaattgcaaaaacgccaacggcaataaagagtagaatggctaacacctttaatacaactaaggcattttcaacgcgagctgcccttgaaacaccatgaccaattaataaggcaactaacaagattgaaactaaagaaatgatatcaataataccaccgttattgccaaaggcgttagataatgacgcgggtagtttccaacctaatggtgcgattagagctctaaagttagcagaaagccccgaaccgacgaaagccaaagcaatgaaatattctgctagaagggcccatcctgctacccaaccccagaattctcctaaaactacgttgatccatgaataagctgatcctgcaaatggcattgcagcagccatttctgcataggcaaaagccactaaaccagcagcgattgctgctaaaataaaggaaatcgctactgcagggccggtatgcttagctgcaacttcaccaggtagagtgaaaattgaagcggagacgattgttccaacacctagagctaagaagtcctttacttttaatgagcgcaccaggtgtccatctttattttcatagacgcgtggatcttctttactgttcattctctgccaaagattcacaacgcaacttcctccttatgttaaaatatattcatctaattataattaaaagtacgttaaaaaatcaactattacatatttgaaattccactttttttagaaattgttatctaagataggttaatctagcactagcttatgacctttgttatactaaagactggtgaaaatcaatggatgaactaactaaaaacgaggagctaggcgatttatatgcctactatggctctttattaacccaggggcaacaatcttattttgaagactattactacaatgatttgtctctaggcgaaatagctgctaatcatcaagtatctcgtcaggctgtctatgataatctcaagcgctcaagtaaaattcttcagaactatgaagagaaattgcatatgaagcgcgacaacaatcaggttgaagatgtcttggcagatacgcttttatctttagataatggtgatagtgaagctgctaaaaaagaaataaccaatttattaaatcaattgaggggagaatagcccatggcttttgaaaatttaagtgaaagaattcaaaaagcattaaaaaatttaactggcaaaggtaaggtctcagaagaagatattaataaggctagtcgtgaaattcgacttgctttgttagaagccgacgttaactttaaggtcgttaaggactttattaaaaccattaagaaagaagcccttggcaaggaagttcaggaaagtttaaacccaggtcaacaagtaattaagatcgttaatgaacagttaacgaagatgatgggtgaagaagcagttcctttaaacaagtctaagcatattccaactatcattatgatggttggtttgcagggaactggtaagactacgactgtgggtaaattagcctatcatttgcaaaagaccgaaaaggcccgtccgctgttgatagctggcgatatttatcgtccggctgctgttgatcaattgaaacaaattggtgatcagttaaaagttccagtatatagtgaagacggagaaaaagacgtagctaaaattgttcaagatggacttgcagaggctgaaaagaacaagaatgactatgttttgatcgatacagctggtcgtttagaaatcgatgaacctttaatggaagaattagagcgggtaaagaaagtaacccatcctgataacattcttttagtcgttgatgccatgactggtcaggcggcaacagatgtagccaaaggctttgacgaacgccttgatgttacgggcgtgattttgactaagttagatggtgatactcgtggtggtgcagctctttcaattcgtgcggtaactggtaagccgatcttatttactggtcaaggtgaaaaattaagcgatttagatgttttccatccagatagaatggcatccagaattttaggtatgggtgacatgctttccttaattgaaaaagcccaacaagattatgatgctaaggaagctgaaaaagtcgctgaaaagatgcgggaaaatacttttgacttcaatgattttgttgatcaattgcaacaagttcaaaaaatggggcctcttgaccaaatcatgaagatgattccgggactatctaataatccgcaattaaagaatctaaatgttgatcaaaagcaaattgatcatactgaagcaattgtttattcaatgactcctgaggaacgagaaaatcctgatatgcttaatccaagccgtcgccgaagaatagctgctggttcaggtcgtcctgtagttgaagtcaataggatgattaagcagtttaagcaaatgcgcgacatgatgagtaaaatgtctaaaggaaatatgaagggcttgagcaatttgcctggaatggattcgccaatggctaagatggcaatgcgccgaatgaacaagaatttcaagaaaaataagaagaagcgtttacgcaaggtaaaaagattccattcttaaaaaataaactgttaaggaaaaatactttacacctgttaagtttggtggtatattattaatcgttaagttttaggaggaaattaatttatgtcagttaaaattcgtatgcaccgtgctggtgccaagagaaagccattttacagaatcgttgttgcagactcacgtatgccacgtgatggtcgcttcatcgaacaagttggttactacaacccagtttcacaaccaaaggaattgaagcttgacgaagacaagatctttgaatggttacaaaaaggtgcacaaccttcagacactgttagatcacttctttcaggtgctggcttgatggctaagttgcacgatgcaaaatacaataagtaattttgctattaattaagagcttgatgccgtgtgcttcaagctttttttatacctaaaggagaaaaaatggaatattacgatgttgctcggattttaactacgcacggtttgaatggtgaagttaaagttagtataattactgatttccctgaagatcgttttgctatagggatgcatttggcaatcaaaggtgaaacttctcaagttttaactgtggccaagagtagaccttttaagcaattttggttagttcaatttgcagagattactgatattgatcaagctgaaaaattaaaaggaaaaatactagttgttagtgaagccgaccgcggtgaactacctgaaggcgtttattattataaggacatctttgactgtgatgtcattgatgaagaatccggtaagcgcttgggtaaaatcactgatattgaatcgcctggtgctaatgatatttggctagtccatgaagataatggtaaagagtattggattcctaatattgcatcggtggttaaaaaagtagatgtagctaataaaaaagtctatgttgagttattggagggcttacgcgatgaagattaatgtattgacactttttcctgatatgtttgctcctttgcaagtttcaatgttgggacgtgggcttgaagataaaaaatgggagcttaatttagttaattttcgtaatttcactaccgatgtacatcatcatgttgatgatacgccctatggtggtggcgctgggatggttttgcaaattatgccgattaaaaaagcacttgactcgttaccatccacaggtaaggtaattattactgcaccacaaggtaaaacttttaatgaaaaaatagcgcaaagctgggccaaagaagatgaattaacctttatttgcggacattacgagggctttgatcagcgggtttatgacttggctgacgaaactgtttcaatcggtgattatgttttaactggtggtgaattgccaacaatgagtatgattgatgctacagtaagacttttacctggtattttgggcaatgcagctagtccagttgaagaaagcttttcacatgggttgttagaatatccgcaatatacgcgtccagcagattttgaagggcaaaaggtgccagagatattgactagtggcaatcatcaaaaaattgcacaatggcggcataaagaggctcttagaacaacatatttgcatcgacctgatttgctcaaagaacgagttttaacaactgaagaaaagaaaatgttggcagatattaaagcagagcttgattaagcaagctctacttgatatactattcatcgtggcgtgaccacaatgaataagtttaggggtgttccgctggcgttggtacgttgatgaatgccgaagaaggagaaaagtatattatggatccattaattcaagaattaactaaagaacaacttcgtgacgatattcctgcattccgtgcaggtgacactgttactgttcatgtacgtgttgttgaaggtactcacgaacgtattcagttgttcgaaggcgttgtaatcaagaagaagggtactggcatcggtgctacttacacagttcgtaagattgcttcaggtgttggtgttgaaagaaccttcccagttaacgacccacgtgttgctaaggttgaagttaagcgtcatggtcgtgtacgtcgtgctaagctttactacttacgtgaacgtcacggcaagtcagcaagaattgctgaagcacgtcgttaatcataacgtcaatcataaaaaaggtcagttccagtggaactggctttttttctacccaaaagttgtatataaaatgctatgatggagttatggaatgaatgaggtgaaataaatgaagttcaattgcaaatttgcacttgtggcagcaaccgtattgacagtagcacctatattatcttttcccaatatcacgactacggtacaagcaacgacgaagaaagcccaagcagctaagaatacaatccaggtaaataaagcaccaataatttatgatcgtgcaggtaattataattcgaaatatcatcaaaatatcaaagctggtactcatttaaaatatagtggcaagacttatattattcagcagcgctttgcagctgggattcctgtgccaactagtcgaattattggtggtaagctttactattcgattggtaaaggaggctatgttaaagaaagcgatgtgttaacctggcttggtaacacaaatacggtcaagttacattttcggcacaagaaaaattatatttatgataaaaatggtaaaaaattagttagctataatggtggcaagaattattttactaataaacaaaaaccaaaaattgaggtaccatactataattcgcctaagcaattatttaatattggtaagggcggttatattgatgccagccaagtaactactttgaatggcaagggaaccgtgtttttaaataataatgcacctatttatgatgcaacaggcaagcaattcaagaataaaaatctaaagcaaggcacggttttaaactattatggtaaacctaagaaagcggctgctaatactcaattttattattatcaaaataaaactaagatgactttacctgcaattcaacaaggtgatcatacttattttcagattagtaaaacacaatatatcaatgcggcagacgttgctttagtagatggtaagacgttgtgggataaaggacctgtgagtgtttctttaataaatgatgcatatgcgtatactgccaaatttaagcaaaataaaaaggtgctttatcgtgctggcgctaaactaacggttgatagaaccaaaatagaaggtgaaaaatcacctcaactttatttacatgttaaaggtaccaaaaactatctttatttgggtaatgaaaaagactatggcgcatcaccattagattatcgtcacggttcaactaatttaatattgcagacactgttgcataattagtctgtgtgtaatacttttaaactgatatcataaaggactattatcttaatagaaggtgatagccttttattttaaaaagatcacaatgataaaatggctgtatagtagtaatgatgaaaaaagattgtgaagaaattcaaccgtgaaacggttgtgaaactaagacaaaaatcacaaagctggcagatatctattactaatcttgatataaaggcatttgttattgtgaagctatttttgtaaaaaataatattaaatgtggaattagcgttagaaataatagttatccacatttgtaaatgtccccagtaaagtcgagtaaaacaaaaatttaaaagaagatggaaaaatggattatccgaaaaaactgattgacgaagtgaaagaacgatctaaaggcatgcagctagaaggaattaattctggctcgggtccccaacatcctttattaatgattgtcggtgaagctcctggtcgaaatgaaattgttaataatattccctttagcggggatgcgggtaaggaattggataaatcattgaagcagattggtctgacacgtgatcaggtatatattacatctgctgtgagaagtcgaccttttgcaatcaaaaaggtttttagcaagcgtgaaaataaagaagtaatcaaatatcccaatcgtaagccaaccaaaaaagagattctagctcatgcgcatttcttagattttgaaattgactatgctcaaccaaaactaattgttgccttgggtaatacgggattagaacgtcttttggggtctggtcataagatttcagctgaacatggtcaagtaattaaaaatacaccaattttacgtttaaatgaaactaaagacggctatatttggtcaaaagaaagatacactattttcccagaatatcatcctgccgctgttttttataatcgcaagctaacagatgatattattaaagattgggataaaatcaagccgtatgtagaaaaggaaaaatctgaaaatgagtaatgaaacttttttgattccaattagacaaaataatgatttatcggatatcgctttaaatgaattacgcatggatctagatgagcatgctttacatcaacgttattacactgatattgcttatttagcaggaaatagtcgtaagtatagtctaaatagtgtacaaaccgttgcgagtcctttgataggtaagaaaattttatttttgggttcttctgttacttttggttttggcgctttgggtgaaagctttgttgattatctttggaagcgtgatggcgttgctgcaattaaagatgcagaaaatggtacgaccttagttgatgaagatacttataagccaaacgattcttatgttgctcgttttagagaagagctgaccgaatcacaacctgatgtttttgtcttacaactttcaactaatgatgcaaatcaaaataaaaaactaggcaaaattactaatcaaaactttgacaccaaaaccattacgggagctttggaatatatgatttcaacggctcaagcaaggtggaaatgtccaattttaatttatactaatccttattttgctaatccgttatacaaacagatggttgaacgagtacacgaactggctcaaaagtgtcacgttgagattctagatttatacgatcatcctgattttcagcatcaagacgctttgtatatggctgatgaaattcatccaactcgtgcgggttatctaaagaaatggttaccattatttgaagaaaaaataactgaaattttggcataaagaaagacctagataaattatctaggtcaaaattgaaattagtcaatgttattacgatacaagctaactaccttacccaaaattgtaactttaggtaaaatgattggagccattgtatcattttctggctgtaatcggtagtgatccttttctttgtagaaacgcttaactgtagcttcattttcttcagtcattgccaccacgatttcaccattgttggcagatgattgtttgcgtacgattacgctatcaccgtttaaaatgccagcgttaatcatactttcaccgtggactttgagcataaagagttcaccagcatcactttttaagtctggtgggagtggaaagtagtcatcaatatcttcaactgccagaattggttgtcctgcagtaaccacaccgataactggaatttcctttggcttgatacctaactcttttttaccttcacgggtaatttccaaagcacgaggttttgtagcgtcttttactagccagccctttctttcaaggcgagctaaatgaccatggacagtggaagtagaagaaagaccaactgcagaacagatttctctaactgtaggtggaatgctccgtttctcaactgtatcgtaaatatattgcaaaatttctagttgctttttatcgcttgtttttcttggcatttttaattctccgtttgtatttatggtacttaatattataacctaattctaccagataatgtcaatattatcaaacaggcgttcttaagaagttatactttttttatgacataaaatagggtagactaatgagtgttaatgtgaggtggaattattatggataataaagatgcaatgagcaaagaagaagaaaaaaaggtaactgatcgaatcaacgaactttaccataagaaagaaaaggaaggcttaactccagaggaagaagctgaaagaaaagaactacataagaaatttttagctaactttagagctgcctttaagcaagatgttgaaaacatggtcatcttagacaagaatggcaaggaagttacctcagaacgtgccaagcgagcacaaagaagaaaaggacttagaaaagattaattagttctttcaaaaagttagagaactatgataagatataaatgttagttagatggaggatttaatatgaatttaggtttagcaatttttttaattatcattgcgctcttgattggcgctgtagcaggtttttacggtgcaagagcttacatgaagaagtactttaaggaaaatcctcctattagtgaagatatgatcgttgctatgatgtcccaaatgggtcaaaagccttcaaataagaaggtacatcaagtaatgaacatgatgaagcaccaacaaaagtaattaatttaatacgcgtggtgctagttaaatcgttttagttaataaaaaagtccaatcttgttagactcaacttgtataataatagaaaagagcctgatctgattgaactgccttaagcttaagcgttttagccaccatttacaagttagttttaaagatttagtgataatttgtcggcactggtatcgtttgtatgcaccggctgagtttactcatcggcgaaatattgatcaaattaaaactacggacagtctgattttggctttacttatctggcaagctaagacaggaattgaatcacaaagaagattctgtgaatgtttcaattgtttatcacactcacgttttaatcgacgttcacgtcagctattgcaattgatttatcagatacggcaagaaatgaataaaaaggttgacctgaatggacatttcttgatcattgacagctttccggtacctgtttgccaaccaattcgcaactatcgtgctaaaatttttcgcggttatgccaacattggttataaggccaccaagaaaatttacttctatggtttcaaagttcatgtcattgttagcgatgacggttacattcttgattatgtcgtaacaaaagcatcagttcatgatgccagggagacagttgaactgatggaaaatacccatccatctaattactatcttcttggcgacgaaggctatttaggcaaagaactgcatcaacagctaaaacaaatgggttatgaactttggacaccatatcgtaaaaatatgacaggagctaaaaagcacaatgatcatcaattgatggctattcgcagaacaattgaaagcgacttttcgcttctgacctattacaatgccgagaacaatcgagcacgtagtctgataggctttcaaagccggttggaaattgcaattttagcttataatttggcttattgtctagaacgatttaactagcaccacgcgtatttaattagttttgttagaaaaggcgaaggatttccttcgtcttttttgtgcacttttaagaatgaggtgaaatatgggaatatttagtaagttagggtggttttttaaggctgagaaaaaacgttatatcataggcattacctttttggcgttaacttctttagctaacttggtaccgccccgtgtattaggcttaatggccgatcaattggatcaaggtcacatctcttggggacaatatggaatgttgatcattgctgtcgtggccgctgcattcacactttatattttgcgctatttttggcgtaaacaaatttggggcggcgcagcagaattagagcgccaaatgcgttcaaagttatttgatcattttatggtgatggatcggactttttatcagcgtcatcgaaccggagatttaatggctcatgctactaatgacgtttctgccattcagaacgttgctggtgatggcgttttaacattggttgattctttagttatgggactttcaacaatgattgccatgatcatttttgttgattggcgtttaactattgtagctttattaccattaccgtttttggcattgggagcttggaaattaggtgatcacttacatgatgcttttgataagtcacaggctgcattctctaagctgaataataaaactcaggaatctgtatctgggattaaggtgctcaaaacttttggtcaagggaaagaagatactgctgcttttgacaagatggtcgatgaaacgatcaatattaataaaaaagtttttgtctgggattccttatttgatccactgggaacaataattatcggtactacgtatgtgatcacgattatttatgggggactattagtaactaacaagattttatcaattggccagttggtttcttttatcgcgtatatttctaacatggtttggccaatgtttgctattggttatttgtttaatattctagagcgtggtagtgcaagttatgaccgtgtagaaaagttacttgatgaaaggcctttgattactgatgcacatgcagatccaaatattacttctcaagatttgcaaggtgaattaaaatatgacattaaatcatttgcatatccagatgagccagatattccagttttaaagcaagtcaatttcactttaaaacctgggcaaactttagggttagttggtcgagttggtgcgggtaaaaccacaattattcaactgcttttgcgagaatttgatcagtatgatggtcaaattactctgaatggaaaagatattagaaatattcaactaaaggtattactcagtcagatctcctacgttcctcaaaataatttcttgttttcaactagtatcggcaaaaatattgctttctcttctgaaaatgtagataaggatgatattgcagctgcagccaagaagagtgatttgcatgatgatgttttgcaaatgcctaaaggctatgaaactttagttggcgaaaatggcttatctctttctggtggtcaaagacagagaatgtcaattgctcgggcattgctaaaagatagtcagattttgattttagatgatgcattgtcagcagttgacgcaaagaccgaaactgagattttgtcatcattaagaaaagagagagctgataaaactacaatgatcgcggctcaccgtttgacttccgtgatggatgctgatttgattttggttctaaaggatggtcaaatcgttgaacgtggtaatcatcaacaactattagctgcagatggatggtatgcggaaatgtggcgtagacaggaattacaagcgaaagtaggtgaagatacagatgaataataacgaagaacagcatgaatctgtttggtctaaggcgataccatttaaagagcaagttgatatttttaagcgtttaatgggctttgttaagcaatttaaatttgaaatgattgttgctttagttggtgcatttattgttagtgtaattaatattcttttgccacgtggcttgcaatatttcttagatcactttctattgcatcaaagcacaacagtgcaggtgattttgtttgcaggttttctttatgctttaggctcaattttaaaggcaataattcagtttacttaccaatatttctttgctttaggatcagaaaaaacgctagagagtgtcagaagggcattgtaccgcaaactgcataagctagggatgcgctattttgatcaaactcctgcgggctcaattgtttctagagttactaatgatacgatgactttgagtaattttttgacggtgctatcaacttttgtgattggtgctttttcggtgattactgcgttagtagcgatgtttactactaatatagttgctgggtggttgattttactctttattccgattttattattagttgtttggctttattcgcaaaaaagctcacgtctttatcgtaattatcgtgagcgtcttagtcgaattaacgctaacttaaatgaatcaattgaaggagtatcggttatccaagaatttaatcaagaaaaacggatgactaataattttgaaggcgaaaatggtggtttaatgaatacacgcttcaacatgatccgagtaaattcattgttattatcgccattgacatcgctgctttattcgttagctttagccatttcattaatgtactttggttttccattacgtgaaacttttgttccagctggtgtagtctatgccttttcacaatacatttcgcaactttttaatcctatttcaactgtgatggatcaaatgacctttttccaagatgggattgttgcaggaaagcggatttttcggattcttgatgatacccaatatgaaccacagcaggatgctcaaaaaggattgacgattactaaaggaaaaattgagtttaaacatgtaagcttttcttatgatggcaagcatgaaattttacatgatatttctttcgtagttaatccaggtgaaactttaggaattgttggtcatactgggtcagggaagagctcgattattaacgtgatgatgcgtttttacgaattcggtcaaggtgaaatcttgattgatgacgttaatattcgtaaatatcctaaagaagaattaagaaaaaaacttggcttggtattgcaagaaccgtttatgttttatggagatatttcatctaacattcgtttgtataataatcaaattactgataatcagattaaagacgccgctaaggcagtccaagcggatcgctttattgaaagaatgccgggtaagtatcatgctaaagtgattgaaggcggagaagaatttagtcagggacaaagacagttaatttctttcgctcgaactttagtcacagatcctaagattttggttttagatgaggcaacagcaaatgttgataccgagactgaaactttgattcagcaaggactaaagcggctgagaaagggtcgaacgacattagctattgctcaccgtctttctacgattgccgatgcggatcaaattattgttttagacaagggacgcataattgaacggggtacgcatgatcaattgcttgcacaaaagggttattactataatttgtataccttgcaaaataatgaaaataaaaactaattgtttttcaggacgtttgtgtagtagcaacgtctttttttgatataatagttaaaaagtattaaataattatgaatatttataaggagcaaaaatgaaaagatattttacagttcgtggtggagctggcgacgtttctaagccagacttaaatgctaagccacaagataacttatacttggctgttaactcagaatggctatctaaagcagaaattcctgctgataagacatctgctggtgtcaattcagagcttgaccaaaaaatcgaagatcgagtaatgaaagactttgcggacattgcggcgggcaaagaaaagatgcctgagattaaagactttgataaggcagttattttgtataagattgcaaaagattttgctaagagggatgcagaaaaagctaatcctattcaaaaggatttacaaaaattaatatccttaaataattttaatgattttaaacaaaaagctgccgatttgtttatgggaccatatgctttaccgtttgtatttgacgtcgatgccgatatgaagaacactgatgtaaacgtactccattttggtggcccaagcacattcttaccagatactacgacgtatcaaactgctgatgctaagcaacttttggatactcttcaagaccaaagtattaacttactgacaatgtccggtattggtaaaagcgaagcacgagtttatgttgaaagcgctttggcctttgatcaaaaattagctaaggtagttaagtcaactgaggaatggtcagattatgccgcaatttataatccagtaacatatgctgactttattaaaaaatttaaatcatttgacatggctgatttcatggattctattttaccggttaagccagatcgaattatcgttatggaaccacgttttctcaatcatgctgaagaattattgaatgaagggaattttgctgagattaaaggatggatgctagttaaatacattaacagcgtagctaaattattgtcacaagattttcgtgaagctgcgtttccttttggtcaagcagttactggtacgccacaattgccatcacaaattaagcaagcttatcgtttggctaatggtgcttttgatgaagtagttggtatcttttatggacaaaaatattttggggcaaaagccaaaaaagatgttgaagacatgatccaacggatgcttaaggtatatgaagaaagaattaatgctaataaatggctttctgctgaaaccaaaaagaaagctgtgattaagttaaaggcgttggttttaaaaattggttacccagacaagatcgaagaaatctttgacttattacaagttgatccgaaaaagagcttgtatgaaaatgaagcggcaatgtcaactgtacgaacgaaatatatgcttaataagttaactaagccagttgaccgttcagtttggctaatgccaggtaatttgaataatgcgtgctatgatccgcaaagaaatgacttaacctttccagctggaattttacaggcaccattttatgacattaatcaatctcgtggtgcaaattatggtggaattggtgcaactattgggcatgaagtatcacatgcatttgataatagtggagcaaaattcgacgaacatggaaatatgaacaattggtggactgacaaagattttgctgagtttaataaacgagttggtcaaatggttgatatttttgatggcttacaatatggtcctgctaagattaatggtaagcaggttgttggtgaaaatattgctgatctagctggccttgcttgtgtagttcaaactggggaaaatgatggggcggatttgaaagatttgtttgagaattatgctcgtagctggatgcagaaacaacgccctgaggcaattaagactgaagttcaaacggatgtccatgcgccacaaccaacgagagtaaacattccggttcaatgtcaaaatgcattctatgatgtatttaacgttaagccaactgatggcatgtggcttgatccagaagaacggattactatttggtaaaattgaataaaaaaatagtcactggatttcaatttctagtgactatttttgatatgtaattatttatcaagcatatatttacgagtcatcggtaaagttttacctgatggtccctttgtcaataggtattggataacgtcgatgttaccagactcgaaactagcagcacaagcattaaggtacatatcccacattctacagaatctttcaccaaatttcttttctacttcaggacgaacggcattaaagttcttatcccaaatttccaaggttctttgataatgacgacgaagagtttccatatcagtaatttgtaggcctgaatcgatgatgtcagtaacaatttctggtaagcctggtaagtagccaccagggaaaatatacttgtttaaccaagcattagtggcaccaccttgttgacgggtaataccatggattaatgcaacaccgtctttgttaaggtacttgtagacatcagcaaagtatttaggtaagttttctttaccaacatgttcaaacattcccactgaagtaatgtaatcccatttttgatcaccaagttcacggtggtcttgtaatctaacttttgcgacatcttgtaagttatcgtcgtagattcgcttttgaactaatttaaattgctcctcacttaaggtaacaccggtgacttttaaaccgtattccttagctgcagtaagcatcagagttccccagccacatccgatatcaagtagggtcttgcctttttgtgggtggagtttgtttaagatatgatgtacttttgcaatttgagcttgttcaagatcatctttattgccatcttcgaagtgggcgcaggaataggtcattgttgggtcaagccacatcttgtagaaatcattaccaatgtcgtagtggctttgaatatcttcttcgctttgcttttccgtgtgtttttgcttaggcataaacttacggaacttagaagcacgcatgaatgaatcagcactttcataagcaccaacaagcaatttttggatattaccatgaatttcgatttttttatccatgaatccttcgcccaaagctagagaagcatttcgagtgatttcactcattggaatcttttcattaaaaacaatttcaatttcaggatcaccattgccataaacttcgctcttaccgtcccagtaggttaccttaacagaaaaggggaaagatttactaagcatcattttgtaaaaagttttttctaacaattgctttttcctccaatatttaaaacctaaaaattattttaacacttatattaaattgcacaggtaaagaaaaatcagtataaagcaatatttgttttatactgatttttacttatttagcaacgtagtggaaatttggatccatttccttatctaatttgttccaagcatcttcaagttgttgaaataaaatttgttcattttcatgggttagtttagttttacgatcaatggtaattggatcaccaaagttaacttctaatggcttgcgcttaagcagtcctttaaaagttaaagggccttggtagacaacaggtaccattggtttttttgacattttggaaattaataaaactccaccttttaattcagctgaatgtcgcgtgcctgaaggaaagataattaatgataactttccttctctaagtcccttaactggaatctttaaggctgatggtccagggttatttcgatcgactgggaaagcgtgagcatgatcaagaataaatcgtaaaaccggatttttgaataattcaattttagccataaacatgaattccattggactagcacctagtgcaaaaagcagtggttcccaccatgtacggtggggggctactaaaatataattgccctgaggcaagcgatccttatgatgaatgtgtagatgaccgtttaacacccaaacgatgaaacggacaatcggacgtataattttgtaaaacattgtctcctcattgattccttcatttgatgtaagctattataaaaatataatgacgagaaaggcaaatatttttatggtagatctgaaagataatgagcgaattgactacatgtatagcgataatcttcgtattattcaagataaaacggcttttagtttttcaatggatacattatttttagcatattgggctaaagacttgatccgtgataaagataaggttgctgatttatgtgcaggaaattgtgcagctacaatctatatggcttattttaatcgtgcccattatgatgcaattgaaattcaaaacgaagtttattctcaagcagttcgttcagtcaagcttaatgagatggaaaatcgtatttcagtttttcaggataatgtgctaaatgcaggacattttttgcggaaagatagttatgatgtagtaacagttaatccaccatattttaaagcacctaagggacatgaagttaatccagatcgtaaaaaagcaattgctcgccatgaacttttgattaatttagagcaaataattgaagtggctagtggcttacttaaaatgaaaggcaaaatgttaatggtacatcggccagagcgcttaggtgagattgcttattattgtatgaagcatgacttaagcatcaaaatggtgcagccatttgtgccacatcgcggtgaagatgctaatttaattattgtagaagccgtcaagcatactggaactgatggaactgttttgaaagatgctgttgaagttcatgaatcaaatggcgacttcactccattagtacagcgaatctcacgagaaactgcagatgacaaagctaaacatgaagcacagggtaaatattacttttatgtcttactgtgtaatgatggcagtttttatggtggttttactaatgatttagaacatcgtttgaaaatgcacaatttaggaaaaggagctaagtatactaaaacacggcgtcctgtacggatgatttatcatgaacagtttgacgataagcgtttagctttgaaacgagaatattggtttaaacatcattcacgtgcttggaaggaaaaatttttgcatgagcataatataaagttttaatccttgcatactgtaatcttttcttgtagaatatttgagtatgctgtgtcagcatatgaaacttaaaacacatcaagagcaatcatcatcgtggtgcccagggtagtggttagatgatgaaatgaacgcttgagaggatataaaaccataggaggaatttaaatatggcagacgttgttacaatgaagcaattgcttgaagctggtgtccactttggtcaccaaactagaagatggaacccaaagatggctccttacattttcactcaaagaaatggtatctacatcattgatttgcaaaagactatcaagatgttagatgatgcttacaactttatgaaggctgttgcccaagacggtggcgttttcttatttgtaggtactaagaagcaagctcaagattcaattgctgaagaagcaactcgtgcaggtcaatactacgtaaaccaacgttggttgggtggtactttgactaactggtcaactatgcaaagccgtattaagagattaaagcaattaaagcaaatgtcagaagatggtacttttgatgttcttccaaagaaggaagttgctctcttaactaaggaaatggacaagcttgaaaaattctttggtggtattgaagatatgccaagaattccagatgtattgttcgtagtagaccctaagaaagaaaagattgctgttcacgaagctaacattttgggtatcccagttgtagctatggttgataccaacactgatccagacccaatcgacgtagttattccatcaaacgatgacgctattcgtgctattcgtttgattgctggtgctatggctgatgctgttgttgaaggtcaacaaggtcaagatgatgaatcagttgaagttgacttcaaggaaaatgcagacggttcagaagaaatcgttagcgctgaagaaaacccagaagactagattttactattagttccgtaggaggatctattaatggcacaaattactgcaaaattagttaaagaattacgtgaacgtactggtgctggcgttatggacgctaagaaggcattagtagaagttgacggtgacatggataaggctgttcaataccttcgtgataaaggtatggctaaggcagctaagaaggctgaccgtgttgcagctgaaggtttaactggcgtttacgttaatggtaatgtggcagctattactgaagttaactcagaaactgactttgtttctcaaaacgacaagtttgttaacttggtaaatgaagctactaagactattgctgaaggtaagccagctgatatggaagcagctaaggaattgaagatggctgatggtactactttagaccaatcattcgttaacgcaactgctacaattggtgaaaagattgttttacgtcgttttgctttagaagaaaagaatgacgaccaagaatttggtgcttaccaacacaatggtggccaaattggtgttatcactgttttagaaggtgcagatgctgcaactgctaagcacttggctatgcacatcgctgctatgagccctaaggttatttcaccagacgaattagatgatcaatttatcactgatcaattagctgtgatgaaccacaagattgaccaagacaatgaaagtcgtgcattggtacataagaaaccattacctcaccttgtttacggttcagctaagcaattaactgatgatgttttggctaaggctaaggaagacatcaaggctgaacttaaagaagaaggtaagccagaaaagatttgggacagaattattcctggtaagatgcaacgctttattgatgataatactcaagttgacaagcaatttgcagtgttatcacaagactacattatggacgatagcaagactgttggcgaatttttgaaggaaaaaggcgctaagttagttgctttccaacgttacgaagttggcgaaggtatcgaaaagaagcaagaagacttcgctgctgaagttcgtgaacaaatgaagtagtcattattacataattatcatagaaaggaggagtacaccgtgtgctccttctttttttgtaaaaattttgtagtgttttaagtgttaaaagacattgcggcattagatatggtagaataattaaagctattagaggaggtcattatgagtcaagttaaatataaacgtgtcattttaaaaatatcaggtgaagctttagcaggtgacaagggtacggggattaatcctactgtaattggtcacttagctaaagaaatcaaatcagttcatgatttaggtgttgaaattggtatcgtctgtggtggcggtaacatgtggcgtggtgaaactggcgctaagttgggtatggaacgtgctcaagcagattacatgggtatgttagcaactatcatgaatggtttagctttgcaagatggtcttgaaaaaataggtgttcctactagaatgcaaacttcaattgaaatgagacagattgcggagccttacattagaagaagagctttgcgtcaccttgaaaagggtcgtgtagtcatttttggtggtggtactggtaatccatacttctcaactgatactactgcagcccttcgtgcagctgaaattggtgctgatgtaattttgatggctaaaaacggtgttgacggtgtttactcagctgatccaaagactgatccttcagcaactaagttctcagaattaactcaacttgatttaatttcaaaagacttgaaggtcatggatagaactgcaagttcactttcaatggatactgaaattccattaattgtctttaacgttaatactccaggcaatatcaagaaggttgtattgggtgaaaatattggtactgttattagaggtgataaataatgaataacgaaactattgaaaaagcaaaaactaaaatgacggattctattaaggtttatcaaaagagattagcttctatccgtgcaggtgttgctaacgctgctcttcttgataatgtccaagtagaatactatggggcaccaactccattgactcaaatgtctagtattaccattcctgaaccacgtgtattgcttattactccatatgatcaaaattcattagatgatattgaacatgcattgttggcttcaaacttaggattaactccggcaaatgatggtaaggtaattagattagtaatccctcaactcactggtgaaagaagagaagaaattgccaaagaagttggaaaatttgcggaagaagctaaaattgctgtgagaaatgttcgccgtgatgccatgaatactttgaaaaaagatgaaaagaatggtgatattactgaagacgaacaacgtaacttagaaaagcaagtacaaaaagtaactgatgatgctgctaagcagattgaccaacttgctgatgaaaagcgtaaggaaattactcaaggttaaagatgagtaataaggataatgaattaaatcatttagccattattatggatggtaatggacgttgggcaaaaaagaggcatagacctcgttttgttggccatcgagagggaatggataatgttgagcggattactttagctgctgataaattaggaattaaagttttgacactttatgctttttctactgagaattgggctcgtcctaaagaagaagtagcttacttaatgaacctccctgttcgcttttttgataaatacatgccaacattgatggaaaataatgttaaggtaaatatcatgggctatttggatgaattgcctgaaaagacttatcgcattgttcaacgtgcaatgtcagagacggccaataatacaggcttaattctgaattttgcttttaactacgggtcaagaagagaaattacgtctgctatgcaggagctcggtggaatgattgaagctggttcactaaaaagcgaagaaattactgaaaaaatgatttcagaccatttgatgactaaaaactttggtccatatcaagatccggatttattaattagaacgtccggtgaacagcgaatttctaatttcttattatggcaattagcatattcagaacttgcctttagcgaaaaaaattggccagattttgatgaaaatgatttaaaaaaatttgtagaagattataagcaccgtaaccggcgctttggtaaagtagacgaatcggatagttaaatatgaaacaacgtacaattacggcaattattgccttatgtctttttattccaattgtgctcgcaggtggcctttggatggattggctgactgtattattcgcagcagttggcattagcgaaatctttttaatgaagaaacaaatcttagtttcttttaattttttgttagccttacttgcaactttaacctggacagttccagactcattctttaaagtatttccttcaaatatcactaaattaggtgtgttttatggaattattatgttgttcttgacctggactgttctttcaaagaataaaaccacttttgatgatgtaggtgtatatattttggctgcactttacattggaataggttttcactatatggcagccattagagcatacccacaaaacggtttagcattgctgggttgtgtttttgttgttgtttggtccactgatatcggtgcctacatgattggacgtaagattggaaaacataaattatggccagttattagtcctaataaaacatgggagggctcgatcggtgcagttgtttgtgccttaatttgtagtgccatctatatggcaattcttggcagcttgggtattaactttggtgtatctgaattaacgatgattattctggcctttttcttatcaattgttggtcaaatgggtgatttagttgaatcagcttacaagcgtttctatggtgtgaaagattccggaaagattttgccgggtcatggtggtatcctggatcgctttgatagtatgctgtttgtattgccagtagtggctacaattttaggtattgttcattaggagaattttttattgaagggtatactaatctttatcgtcgtctttggtatattggtatttgtccatgaatttgggcattttatcgtagccaaaaagtcaggtattttggttagagaattctcaattggaatgggtccaaagctttttcaaattagacgtaaccccaccacttataccattcgttggttaccacttggtgggtatgttcgtttagcaggcgctgacgatgaaagcaagctggatcctggtatgacggttgttttacaattgaatgaacaaaatgaagtagtgagaattgatgcttcagaaagcgaaataccaattgaaggaattcccgttcaagtaacaaaggctgatctagtagacgatttaataattaagggttacgaaaatggcgatgaaaatgatccagtaacttatcacgtagctcatgatgcaactattattgaaaaaaacggaactgaattaattattgcgcctcgagatacacaatttaatcaagctaatgtttggcaaaagttggcaactaattttgctggaccttttatgaacattcttcttgggtttgtagtatttttaatctggacatttacagttccaggtccagcaacaactacagttggatcaactcaggctaattcaccagcgcgtgatgcaaaaattgtgactggtgatcagattgtggcaattaatggacaaaagattaataattttgatcaagtgtcacagcagattaatcaaagtaaaggcaaggtcttacactttgaattaaagaaaaatggtcaaattaggaaagttacagttaagccaaaagctcataaaattcaaaaacaaacagtttatcaaattggtattgtagctaagagcaatgagaatgcagttgttaaattaaaacgtggctgggatacagctatttcaactaccggtctgattttcagagccgtaggtaacttatttagccactttagtttgaataaattatcaggtccagttggaatttattctcaaacttcacaagtttcacaaatgggctttacttatgtattagcctttttaggaatgatttcgattaatttgggaattgtcaatttaattccaattcctgggcttgatggtggtaaacttttattgaacttaattgaattagttcgcggtaaaccgatttctgaagaacatgaggcaattgttgaattaattggtttcggcttattattagttttaattattgcagttacaggtaacgatatctatcgctattttattaaataattatattttttactttaggagataagaatgcgtcaatcaaaattttttatgccaactttgaaggaagcaccatcagatgcagtggctgaaagtcataagctgatgattagaggtgggtatattcgtcaagtcacagctggagtttatgcttatcttccattaggctaccgtgttttacgcaaggctgagggaatcattgaacaagaaatggataaaattaatgttccagaaatgattatgcctcatttacttcctgcaactttgtggcaagaaagtggccgttacaagaaatatggtgcagaaatgttcaagttaaaagatcgtcatggacgtgaaagcttgcttggacctacacatgaagaaacttttaccgaaattattgctaagaacttaaagagttacaaacaaatgccacttgctttgtatcaaattcagactaagtttcgtgatgagaatagacctcgttttggccttcttcgtgggcgtgaatttgtaatgcttgatggttacagttttgctgcaactcgtgatcaattggatgaacaatttgatgatcaaaaaaatgcatataagcgtatctttaaacgtgccggtgttactgttcaccctgtaattgctgactcaggtacaatgggaggtaaaaactctactgaatttcaagcccctgctgctatcggtgaggatacaattgctactaatgaaaaaggaacatatgctgccaaccttgaaatggctaagagtattgatactttcaagcaagaaccagaagatgctaagcaattaactaaggtagctacgccaggctgcgatacaattgaaaaattagctaaattcctcgatgtaccagctactagaattgttaaaagtattttatacattgctgatgaccaaaaagttttagtattaatccgtggtgacaagcaaattaatgaggttaagttgggtcatatccttgacgctgatgaggttcatgaagcaaatactgctgatttaaaggaaatcactggtagtgaaaagggtggcgttggtcctgttaatgcagattgggctgataagattattgcagatgaaactgttaagaatctttacaacgttgtagttggtgcaggtgaaaccgattatcaatttgaaaatgctaacttagaccgtgatttcaaggtggatgaatttgctgatattcggactgctaacgaaggtgaaccagatcctgttgatcatttaccgcttaagttcactacttcaattgaagttggtcacattttcaagttgggtacttattacactaagaccatgggtgcagatttcttagatcaaaatggtaaagcaaagcctgtcatcatgggttcatacggtattggcgttactagaatgttatcagcagctgttgaacaacacttaactgaacgtggtgttgcatggccaaaggaaatcgctccatttgcaatacatattgttcaaatgaagatgaataaagaagatcaaactgaattagctgaaaaacttgaaaagaaattcagtgaaaagtatgatgttttatacgatgatcgtaaagagcgtgctggtgttaagtttgctgatgcagatttagtcggtgcaccaattagaattacgattggtaagaaggctgctgatggcattgttgaagttaagcgaccaactgatgacaaagcaaccgaaatgtcaattgatgaattagataagtttgtaaatcaagagttaggataatttttgtggcaaataaaaacgatcttttcttaaaattgctcaaacaggttcaatttcctgatagttttgaagacaatgcgcttctacaaaaagggaaaattgaaaacgtggatgtttacgctaaagaacacaggtgggatatccacgttttttttgatactcccttgatgtatgacacctatgtagcattaagaaaagctgtagaagaaactttttcttcttttgtaaatgtaagattttatgttggaacagctgatggttctgatcaatatttaccagattattggcattatgtagttcaaaattcaaatattttgcaacctgtggctcgtgaatttttggctggccaaaaacctaaaaaagttgatggccgctgggttattccagttgataataatgtgattgatggtttaattgagcagaaggctttagatgatttagctgaaaagatgcgtgattatggcttctttaatttgaaatttataactcagctggatcagacaagttctaaaaacaatttagaaagtttgcaggagttgcaacaagagcatgaaaaaagcatgcaggaagtctttgagaagacgccagacaaacctaaaccgcaacaacctaaacagtatccaactagacgtactaattatggtaaacgtaaattagatgaaaatgctccaattacacaaattaaagagctggaagatggcgtacgtaatgtagtaattgagggaaatatttttaatgttgaaactcgtgagcttaaatctggtgcaatcattttttctggcgaaattacggattatagtgattcaattgcatttaagaaatttgtttctaataaagatgaaattgaagagctatctgcaattaaaccaggaacttgggctaaaatgcaggggtcagttgctgatgatcaatatatacatgatgtagtttttaatattagtagcttagagactgtcgagcatgttgggcgaactgaaaaatacgaaggtgagcctaaacgagttgaactacatgttcatactaatatgagtcaggttgacgcaactaatactccgacggactttattaaaactgctaagaagtttggacaaaaggcaattgcgattaccgatcatggtgatgttcaatcattccctgaagcatatagcagtggtaaagcactggacatgaaaatattgtatggtgtagaagctaatatgattgatgatcatgctttactagttttgaatcctgcaccgatgacctatgaagaccgcgagtttgtaatttttgacgttgaaactacggggttgtcatctgtttacgacacaattatcgagattggtgcggttaagatgaagaacggagaagtgcttgaacgctttgataagttcattaatccgcaccatcctttaagtgagcaaactattaatttgacttcaattacagatgaaatggttggcgcagccgatgatgaagcagttgtcattaagcaattccaagacttttatggcgatcgaccactgtgtggacataacgttcaatttgatgttgggtttgttaatgcagcattaagacgtgcagggctaaaagaaattactcagccagtagttgatacacttgaagtatcgcgtttactacatccagagcagagtcgccatactttagattcattagctaagaagtataatgtttccttggaacaccatcaccgggcaaatcaggatgctgaagcaactggctatttaatgtttaaattgttagatgcttttaataaaaagtatcatgaaaataatttgaataatttgaatggctatgcagcacatggtgaagtttataaacgagcccgtccttcccatatgacagttttggcaaaggatcaagctggattaaagaatctttacaaattagtatcaattgccagcacgaaggactttttccgtattcctcgtacgccgaagtcagatttggctcgtttgcatgatggtttactttatggttctggttgttggcaaggcgatgtctttatcgcaatgatgcaaaaaggttacgacgaagcaagagaaaaagctaaattttatgattatcttgaagttcaacctccagcaacctattcgcaattaattgctgatggtttgattaaggatgaagatcaattacatgaaattattgaaaatattattaaattagggaaggaattaaataagcctgtagttgcaactagcgatgcccactacgttgaccaaaaggacgctatttatcgtaaaatcttgattgcggctcagagatcaaaccctagtcgaaataagccacagccagatttgcatttctattcaacacaggaaatgctagatgcattttcattcttaggcgaagatgtggctaagaaaattgttattgacaataccaataaaattgctgatgaattgtcagaaattcagccaattaaagatgggttatacccaccacatattgaacatgccgatgaagaaatgaagaagttgacctatgataaggcttatgaattatatggtaagccattaccgaagattgttaaggatcgaatagatttggaattaaattccattatttcgaatggttatgcggttatttacttgatttctcagcgtttagtagctaagtcaaataaagatggctatttggtaggttctcgtggttctgttggctctagtctagtagcaacgatgtcaggaattactgaagttaatccgttagctccacactatcgttgtcctaactgtaagtattcacaattctttgaaaatggggaatatggttctggttttgacttgcctgataaagattgtccaaaatgtggaactccattagttaaagatggacaagatatcccatttgcgactttcttaggatttcacggcgataaggttcctgatatcgatttgaacttctcaggtgactatcaaccagtagcccataattttattcgagtaatgtttggaccagataattcatatcgtgctggaacgattgcgactgttgcggataagactgcttacggttatgctaaacactacgatgaagagcatgatttaaagctaagaaatgcggaattagaccgtttggcagctggtgtccgtggtgtcaaaagaactactggtcaacaccctgcaggaattgttgtagtgcccgatgatatggacatttacgattttacgccggtatcgtatccagccgatgatgtaaatgccgcttggttgattactcactatgacttccactctattcatgataatattttgaagtttgatattctgggacatgatgatccaactatgattcgtcacttgcaggatttgtctgggattgatccattgactattccacccgatgaccctggagtcatgtcattattttctagtcctgatattttaggtgttactccagagcagattcaatcagaaactggaactttgggtgttccagaatttggtacccgttttgttagaggaatgcttgaggagactaagccaacgacattttctgaattattacagatttcaggtttgtcccatgggactgatgtatggctaggaaatgctgaggacttaatcaatcaaggaatttgcaaactgaaaaatgtaattggttgtcgtgacaacatcatgatggacttaattcactggggcgttaagccagaagttgccttttcaacaatggaatccgttcgtcatggtcgtggcatcagcgatgaaaatatggctattttaaagaaaaataagaatattccagattggtatattccttcttgtctgaagatcaagtacatgttccctaaggctcacgctacggcttacattttaatggctctacgaattgcttggtttaaagtatattatcctgaaatctattacacagcttacttttcagttcgtgccgatctatttgatttggttgcaatgagtcatggtaagaatactgttaaggctgcaatgaaggaaattcaggataaaggaaacgatgcatcagctaaggataagagtttgatgaccgtgctagaaatagctaatgaatgtctagaacgagggattaagatcaaaatggttgatattgatcaatctgaagcaactgactttaagatcttagataagcatacaattttagcaccgttcaatgctgttcctggtttgggggataatgcagctaagcagattgtagctgctcgtgcagaaaagaagtttttgtctaaagaagatttagctaagcgcggtaaagtatcacaaacaattatgaattatttcgaagaaaatggtgtcttggaagggatgccagatgaaaatcaattatcacttttctgatagttaaattttacaagatcaggtaaaacatggtatactacgtatgaagttcgaataggtaaattcgagtgagcagtgatgctcactctttttattacggaggaaaatttttgtctaaagttatagattctgttcgtccagttgtcgaaacaattattgatgaacatggtgacatgttggttgatatggaatacgttaaagaaaaagggcaaaattatttacgcatttatgttgatcgccaaccaaacggtattgacattgatgagattgcagctttaagtgaacttgtttccgaaaagctggatgctcttgatcccgatccacttccagatccctatgttttggaattatcatctccaggggcagaacgaccaatcaaaacaaaagctgattgggaaaaagctctgaatgattacattcatgtcggtctttatcaaaagattgagaataaaaaaatgtatgaaggtacactcaagtcttataatgatgacgaagttgtattagaaataaaagataagacaagacgaaaaacattaactgttccccgtaagttaattgcaaatattcgttttgcaattgaattttagaaaggttgatcaaaaacttatgtctaaagaaatgctagaagcgtttgctactttggaaaataccaagggcattaagcaagatattattgttgatgcaattaaagccgctttggtagctgcatacaaaaagaattataatcaagcacaaaacgttgaagttgattttgatgaaagaaaaggtaacttcaaggtaatggcagttaaaactgttgttgacgaagtgcaagatgaccgtcttgaagttagtttaaaggatgctttaacaattaatcgtgcttatgaagtaggcgacgaaattcgttttgaagtaacacctaaaaattttggtagaattgccgcccaaactgctaagcaagttatcatgcaacgtctacgtgaagccgaaagaaaacatattattgatgaatattcacaatatgaagatgaattggttactggtaccgtggaaagacgcgacaatcgtttcgtttatgtaaagattggtaatgttgaagctgttatgcctcaccgtgatcaaatgccaaatgaggtttacaatccccaagaccagattcgtgtactagtaactcatgttggctccgatagcaagggtgcacaaattacagtctcaagaactgctcctgacatggttaaacgattgtttgaacaagaagttccagaaatttatgatggaaccgttgaaattgtttcaatcgcacgtgaagcaggtgacagaactaagatggctgttaagtcaaatgatcctaacatcgatccggtaggtacctgtgtaggccaaaagggtgctcgtgtacaaaatgtagttaacgaacttggcggtgaaaatattgatatcgttaagtatgaagaagatccatctgactttattgctaatgcattaaatccagcagaagtgattgcggttcaatttggtgatgatgaagaagaaaaaagtgctttagttatcgtaccagattaccagttatcacttgcaattggtaagaaaggtcagaacgttcgcttagctgctcgtttgacaagctataagattgatattcgtcctgaatctgaagtagaatttgtagatgaaaaaacaaatgatacagctgatgctgcagatagtagcgaaacttctgaaaatgttgaaagtacagatgacgctgctgacgttgaaagctcagatgatacaactactgtagaagattcaagtaaagaagataaaactgaagaataggtgattttttgaaaaaaagaaaaatcccaatgcggaaggatttattaaccgatacaatgcagcccaagaaggaattagtacgtattgttatcgataaagaaaaaaatgtgtcagttgatccaacaggtaaaaaggctggtcgcggcgcatatgtttcccttgatccaagtaagattgaagctgctaaagagaagaatgtattagaacgtagtttaggtgcgaaagttccagatactttttacgatgagctttactcttatgttgatcatcaaaaggcaagaaaagaattatttggtgataaataagattgcaaaatagacaaaaagcaattaatttgttaggtttagctgagcgtgctggtaagttaactaccggtacagagacagtcattaatgaacttaataagcacaaaatcaaagcggttattatggctagtgatgttcaagacaacacggcagaaaaagtaaaccgcgctgccagaaaagacaatattcctatgataactatgtttactgccattgaattgtcaaaggcaattggcaaaaaacgcaaagttttaggattaactgatgctggttttgctaaggcgttagttaaaaaaataaatgaaggagtgtgattggatggcaaagaaaagaatttatgaaatcgcaaaagaagtcggcgttgataacaaagttgtagtccaaaaagcaaaggatttaggcttagatgtaaagaatcacatgtcatcagtagatgattcacaggttgcaaagttaaagaatagtttccaaaactccgctcctgctgcaaaatcttctaataaaaagaataaaataaaaatctctgtttcttctattcgcaaaaatgaaaagaagcaagaagataataatagttctaagaattctaagagacgcaataataaacgtcgttcaaataatcacggtcatgagaataaaaatgatcgtagaaataatacaggtaagccaaaggcagctgctttgttacaacaatttaaacaaaagcaacgggcagaagaagggcaacttaatcgtgaagcccaaaaagccagaaaagaatatcatgagcaattaagacatccaaaacaagaacagccagtgaaagataataagaaaacaagcaaccacaaagataacaagaagaaagcagaaccagtagaaaagaaagttattggtcctaagattttaaagccttctccagctcgtttgaagaagcaacagcctgaagcgactaaagaactagttcaagttactattcctgaggctcctaaggaagaaaaacgcggcaataatcgtggtcgcaacatgggaaagccaggacgcaagggtaaaaatcaatttggcaatggtcgtagtgaccattcagatcgttcagagagaaagcggcgtaagaataaaaaacgtcaacaagagcaaaagccaaagaaaacacttactaagcgtaaggaacgtccattaccagaaacattagtttacgaagaaggtatgaacgctcaagatattggtaagttaattcaccgtgaaccagctgaaattgttaagaaactcttcatgcttggcgtgatgactaaccaaaaccaatctttggataaagatacaattgaacttttagctgctgaatatggtatcaatgctgagcaaaaagttcatgaagacatctctgatattgataatatctatgacaagagaatggaagagtcaaaggaatctaaaaaccaggttaaacgcccaccagttgttacaatcatgggacacgttgaccatggtaagaccactttacttgatcgtcttcgtcatactcatgtttcagctcatgaagctggtggtattactcaaaagattggtgcttaccaagttagattagatgatcgcttaattacattcttggatacaccaggacacgcagcattttctaacatgcgtgcacgtggtgctgaaattactgatattgttgtactggttgttgctgcagatgatggtgtaatgccacaaactgtagaagcaattgaccatgcaaagagtgctaatgttccaataattgtagcaattaacaagatggataagccaggtgcaaatccacaacacgtaactgaggaattaatgaaatacaatttgattcctgaagattacggtggtgatactatcttcgttaatatttcagctaagacaggtcaaaatgttgatgacttattacaaatgatcttgttgcaatctgatgtgatggaacttaaggctaatccaactgaaatggcaattggtactgtgattgaagctcgtttgtcacgtggtcgtggacctgtagcagacgttttaatccaacaaggtacacttaatgttggtgacccgattgttgttggtaacacttttggtcgtgttcgtactatgactaatgatcgtggacgtcaagttaagaaggctacaccatcagaacctgttgaaattactggtttgaacgatgtgcctgaatctgctgataagttagttgaatttaaggatgaaaagaccgctagaagtgttggtgaagctagagcacaacaagctttacaaaagtctcgtgaaaatgttcaacacgtaactcttgataacctcttcgatactatgaagaaggaaaacatgaaggaagttgacattgtcttgaaggctgatgttcaaggttctgtagaagctttacaacaatcgcttgaaaagattgaagttgaaggcgtacgtgtaaatatcattcactcaggtgtaggtgccattaatgaatcagatgtaactttggctggtgcatcaaatgcatttattattgggttcaacgttcgtccaactgctactgctaagagccaagctgaaaccgatggcgtagatattcgtctttacagcattatttacaaggctattgatgatgttactgctgccatgaagggtatgcttgaaccaacttatgaagaaaaggttatcggtaatcttactgttcgtgaaacttggaaggtttctaaggttggtacaattgctggttccttcgttgataagggcttggttaagaatgattctaagattagagttattcgtgatggtatcgttaagtatgatggtgaaattgcttcacttaagagatttaaagatgatgttaaggaagttaagcaaggtaacgattgtggtttaacgattaaggactacaacgacattaaagttggcgacgaattcgaagtttacgaaatgcaacaagttgagcctaagtaattactattaggaggaaaacatgaagcatagaattggtcgtgttgaaggtgaaattctacgcgaattaaccaagattttacaaaagaatattcgtgatccgcgcttaagtggtgtaactattaccgcagttgaatgtacgaatgatctttcatatgcaactgtttattacagcctgctaactgaagatgagcataaggaagaagaggttcaggcaggttttgaaaaggcaaaaggcatgatgcgtcatttgcttggtcaaacattaactgtttataaggttcctgaattaatttttaaacgtgataattcagttttgtatggtagtaagattgaccgtttgattgcagaagttaagaaacaagatgctaagcgggaaagcaaataaaaaagagggcgccgtgatggtgccctttttttgttgaaaagaatagggaataattatgttaaacggaattttagttattgataaagataaagggatgactagtgcagatgtagtttatcatttgcgccgcgtattacatattagaaaaataggacatgctggtacgcttgatcctgaggtgacaggcgttttaccaattgctattggtcaggctactaaattaattgaaatgatgcatactaggccaaaagaatatattggcacgggactatttggttatagcacagatagttatgatgcaactggaactgttttaaaagaaaaaaagttgattcagcctttttctggtgcagaaattcaagaaaatatgaataaatttgtaggagaaattgttcaagtgcctccaatttattctgctgttaaagtgaatggtaaacatctttatgaatatgcgcgtgaagagattgaagtcgagcgacctcagagaaaggttgaagtcaaacaatatgatctaactaaagaaccagtttttgatataaatactgggcaagaaagctttgattttaagattaaatgcagcaaaggcacttatgttagatcgttagttaatgatctaggtgaaaaattagattgccccgcaacgatgacttatttgagaagaacagctagttctggctttgatattacacaagcagtaaaattaaaggagattgaagagaatccgaaaaaggccactgaacttatacagccgattgatgcattttttaaggaatacactcaggttgatttaactgaagaaaagtggcttaaagttaaaaatggagcgggtatttcgcttgaaactaatgcgaaaaaagttgcactacgatacaataaaaaggtgaaagcaatttatgaaaaaaaaggaaagctttatcgcccaagcttaatgctgttgcaaaatgaataaatgaaatgaaggaattagctgtgaaaatcgttcatttaacatatcctgttaaggaaaatattttatctactagaattgtgcttgcccttggcttttttgatggggttcatttgggacatcagcgcttaattaatcaggctaaagaaattgcattacagaagaaattgtcattagttgtgttgacctttgatcgacatcctaaggaagtttatgagtcgaaacgagattttaaatacttagaaactttggaagaaaaagctaacaaaatggcggaattaggagtagattatttggctgttttaccatttactaaaaatttcagtcaaatttctgcacaagaatttgtcgataatgtaattgtcagattaaatgctgataccgttgttgctggctttgattacacttatggttctaagaatattgcaaatatggctaatttaccccaattttccaaagggcgttttaatattgtagtgatgccaaagcaaacttttaacggtagaaaaattggctcaactgaaattcgtcaagcaattaaggatggtcagatgaaattagccactgaattaatggggcaccattatgtaatgagtggtatcattgggcatggtaaacgaaatggtcataagctaggctatccaacagctaatttgatttgggcagaacataaggtgattcctaaaattggagtttatgctaccaagactaaagtaaatggtaagtggtataactccatgactagcgttggctataatgtaaccattaatcaggacaagaagatatatattgaatctaatatttttgattttaatgaagatgtctatggtaagccaatgaagatcaaatggtataaatataccagaggtgagaaaaaatttgccggattacctgaactgaaagagcaacttgaacgagatgagcaagaaattagggcttattttaagcaaaagggttaagaagctacgtactttgaaaaaagtgcgtattttttgaataaaattagcaatctacttgatttagtgctaatttctggtatcatattaactgttagcacctgagagatgtgagtgctaaaagtgagggcgatataatatgttgaccgagcgtcaagagcttattttaaaaacaataattacagactttacacaaagtcatgagccagtaggctcaaagaccgtaatgaagcagttgccaattaaagtttcaagtgcaacgattagaaatgaaatggccgtgttggaagagcaggggttaattgaaaaaactcactcttcaagtggtcgaattccttcaagcgagggctatcgttattatcttgataatttagttgagccgttgcaattaccagagtctgtttataatacaataggaagccaattagatcgaccttttcatcaagtaaatgaaattgtacaagaagctgcacgaattctgtcagatttaactaactataccgcatttgcggaaggacctgagagtcatgatgttagagtcacaggatttagaattgtaccgctgtctcaacgacagattatggcaattttggttacaagtgatggtaacattcaaaatcaggtatatgctttgccacataatattcacggcgaagaaattgaaaaggctgtccgcatgattaatgatcagttagtcggaaagagcctaaatgaaatcaacgtttcgttgctaagtgaattagctaaaaacgaattaggcggcgaacatgtgactgaattgcttagtttagttgaagatgtcgtaaaagatgcagctagtgagcagatgtatgtggatggacagattaatttgctcaataatacttctgaacatgatgtaaatgacattcgttctttgtacgagttgattgatcataataatctgttcactaatttaatggatgcaaaggtggatccaaagtctggaaattattcagtaaaggttaagttgggatctgaattacccaatgatttattaaaaaattatagtttgctgacagctgagtacagcgttggctcccatggtaaaggaactattgctttacttgggccaacgaatatgccatattcacaaatgattgggttgcttgaatattttagaaatgaactagctaaaaagttgcttgattattatggcaagtttcaataaaggaggttagccgtgagtaaagaagaatttccaagtgaaaaaaatctagagcaaaaagaaaagacttctgagcctaaggctaaaaaagaagccgataaaggtgaagaaaagaagcaagaaaaaaataaacaagatcaaaaattagctaaagaattagctgatttaaaagataagaacaaggatcttgaagataagtatttgcgtagtgaagcagaaattcaaaatatgcaaaatcgctacactaaagaacgtgctcaattaattaagtacgaatctcaaagcttagcgaaggacattttgccagcaatggacaatttggaaagagccctaagcgttgaggccgatgatgatgtgtctaagcagttaaagaagggcgtgcaaatgaccttggatgcacttgtgaaggcaatgaaagatcacggtgtagttgagattgaggctgatggcgttaaatttgatccgacattacatcaagctgttcaaacagtagcagctgagaatgatgatcaaaaagatcacgttgttcaggttttacaaaaaggatatcaatataaggatagaacactaagaccagcaatggttgtagttgctcaataagagaggaagctaatatatgtcaaaagttattgggattgatcttgggactactaactcagcagttgcagttcttgaaggtaaagaaccaaagattatcactaatccagaaggtaaccggactactccttcagtagttgcatttaaagatggtgaagttcaagtcggtgaggtagcaaagcgtcaagctattaccaaccctaataccattgtttcaattaagcgtcacatgggtgaagctgattataaggttaaagttggtgataaggaatatacaccacaagaaatttcagcatttattttacaatatattaagaaattctcagaagattacttgggtgaagaagttaaggatgctgttattactgttcctgcttacttcaatgatgctcaacgccaagctactaaggacgctggtaagattgctggtttgaatgtgcaaagaattattaacgaaccaactgcttcagcattagccttcggtttaaataaagaccaagatgaaaaagtcttagtatacgaccttggtggtggtacttttgatgtttctgtattgcaattaggtgatggtgtcttccaagtattgtcaactaatggtgatactcatcttggtggtgatgactttgatcaccgtatcatggattggttaattaagaactttaaggatgaaaatggtgttgatttgtcgaaggacaagatggcaatgcaacgcttaaaggatgctgcagaaaaagcaaagaaggacttgtcaggtgtatcaagtactcacatctcacttccattcatttctgctagcgaagctggtccattacaccttgaagcagatttaactcgtgctaagtttgatgaattaactgctgacttggtagaaaagactaaggtaccatttgacaatgcattgaaggatgcaggtcttactgttaatgacattgacaaggttattttaaatggtggttctactcgtattccagctgttcaaaaggcagttaaggaatgggctggtaaggaacctgaccattcaattaaccctgatgaagctgtagctatgggtgcagcaattcaaggtggtgttatctcaggtgatgttaaggatattgttttacttgatgttaccccattgtcacttggtattgagaccatgggtggtgtcttcactaagttaatcgacagaaacactactattccaacttcaaagagtcaaatcttctcaactgcagcagataatcaaccagctgtagatgttcacgtattgcaaggtgaacgtccaatggctgcagacgacaagactcttggccgctttgagttaactgatattccaccagcaccacgtggtgttcctcaaattcaagttaccttcgatatcgataagaacggtattgtaaatgtatctgctaaggatatgggtactggcaaggaacaaaagattactattaagagttcatccggtttatcagatgaagaaattaaacgtatgcaaaaggatgctgaagaacacgctgatgaagataagaagcgtaaggaagaagcagaccttagaaacgaagtagatcaattaatctttactacagataagactttgaaagatactaaggataagctctctgatagcgatcgtaagccagttgaagatgctcttgaagctttgaagaaagcccaaaaggacaacaacttggatgaaatgaaagaaaagaaagatgctttatccaaggctgctcaagacttagctgttaagttgtatcaacaaaatggtggtgctgctggtcaagctggtccacaagcaggtcctcaaggcccacaaggtggtaattcaaataatggcaacaacggtaatgcccaagatggtgaattccacaaagtagatccaaataagtaatgggtttataattaaacaaaaggagaaaagaactacccattgagtagttcttttcttttgagaatacaaggagttcaaatagatggcacaagaagattactataaagtacttggcgtagatcgtgacgccagtgatcaggaaataagtagggcatatcgtaaattagccaaaaaatatcacccagatttaaaccatgaacctggagctgaagaaaagtataagcaggttaacgaagcctatgaggttttgcatgataagcaaaaacgtgcgcaatatgatcaatttggttctgctggtgtaaatggtcaaggtggctttggtggtggagctggtcaaggctttggcggtgccggatttgatacttctggctttggtgattttggcgatatctttggcgatatttttggtcaaggccgtcaacagagggttgatccaactgcaccacaacgtggccaagatttggattatcaattgacaattgattttatggatgccattaagggcaaaaagacccaggtcagctatactcgaagcgaaacttgtgaaacttgtggcggtaatggttgtgaaaaaggtacacatccaattacctgtgataaatgtcatggaactggttatatgacaattactcaacaatcaatgttgggcatgatccgtcgtcaaaccacttgtgacaaatgtcatggtcgtggtgtgattattgagtatccatgtaaaacctgtggcggtaaaggaacagttgaccgtaagaatactattgaagtggatattccagcgggaatcgacaatggtcaacaacttagatatcaaggccaaggcgaagcaggtataaatggcggaccatatggtgatttatatattaactatcgaattaaaccatctaaagattttgagcgtcgtggccagactatttatacagaagtaccaatctcatttgctcaggctactttaggagatgaaattaacgttaagactgtgcatggtgatgtaaagctaactattccagctggtacgcaacctaataagaagtttactttgcgtggacagggtgtgccatatcttcgtggtaatggcaatggtgatcaaattactacagttaatattgttattccaaagcacattaatgataagcaaaagaaagatttgaccaactttgttcatgatggtggtggcaatattacaccacaagaaaaaggattttttgaacgcttaaaagataagtttaatatgtaaatgctaaaaaggtttctgctacttgcaacagaaaccttttttaagatcaattaattttttggtgatttttagagtttttcttggaaaatattcaatgctgaattttcaattattattctaaaaactctgcattttattgaaaatttactatgctacaatttcatcatttattctagctttgctataattaatacatagtaaagggtgaacgattttatggatttaaaaaaattaaaagactatcaaaaacacattcgaaattttgctattgtggcgcatattgaccatggtaaatcgactattgctgacagaatcttagaattaactgatacagttagtcaacgtcagcttaaaaatcagatgttagatgatatgccacttgaacgtcaacgtggtattaccattaaaatgaactcagttgaagtgaaatatcatgctgaagacggtgaagactacattttccacttaatcgatacaccaggacacgttgacttttcatatgaggtatcacgttctctagctgcctgtgaaggtgctttaatggtggttgatgcttctcaaggtgtacaggctcaaactttggctaatacttatttggcaattgatgacgatttggcaatcttgccagtaattaacaagattgacttaccatctgccgatgttcctaagactaaggaagaaattgaagaaatgttaggtttggatgcttcagaagctgccgaagtttcaggtaaaaccggtcaaggtattaaggacatgctggaaaaggtagttaaagatattccagctccgtctggtgatattactgctccattaaaagcattgattttcgactctaaatatgatgattatcgcggagtggtaatgtctgtcaaaattgaagatggatctattaaaccaggcgatcgaattcaaattatgaatactggcaaggaatatgaagtcacagaggttggtgtttctagtcctcatccaattaagaaggatattttaatcgcaggggatgtaggatatattactgctaacattaagtccgttcgagaaacacgtgttggtgacacaattactcaagctgataacccaacggctgaaccacttccaggctatcgtcaaattccaccgatggtttattctgggatgtacccagttgacaaccgtgattatgaagatttgaaggaagctttacaaaaactacagctgaatgatgcagctttagaatttgagcctgaaacttcaacagctttaggctttgggtttcgttgtggcttcttaggcttacttcatatggatgttgtacaggaaagattagagcaagaatttgaccttgatctaatcatgacagcaccatctgttgattatcatgcaattatgaatgatggaacaaccaaggtgattgataatccatctgatttgccagatgctggtgaatataaggaagttcaagaaccttatgtaaaagcggaaattatggtgccaaatgattttgttggtccagtaatggagctttgtcaacgtaagcgtggtgaattcgttaccatggattacttggataagtaccgagttaatgtaatttacaacatgccattagctgaaattatttttgatttctttgatgatttgaaatcttcgactaaaggttatgcttcacttgattatgaaattacgggttatcgtgctactgatttggttaagatcgacattttgcttaacaaggagccaattgatgcattgagttttattgctcacagatcagaagctcaagatcgtgcccgtcaaatgacttcaatgctaaaaaaactaattccacggcaaaactttgaagttgatattcagggcgcaattggagctaaaattatttctcgagctacaattaagccataccgaaaagatgttacctggaaaatccatactggtgatccagatcgtcgggctaagctgcttgaaaaacagaaacgtggtaagaagcgaatgaaagcagttggtagagttgaagtacctcaagatgctttcatggcagtcttgaagatgaacgatgatgacatcaacggtaaataaaaatggctaaaaataaaaaaaatagtgtaagtacaattttacttagagttgctgctatcatattattgcttgttggtattgctttgatatttaacaaacagatcagtgatcaattaattcatcataatcaacaatctactttaagtggaataaatagaaagacaattgaagaaaacaaaaagaaaaaaggaatgtatgattttagtaaagttaagtctttaggcattgcacaagcagcaagatcacaagtgaaaaagacttctggtgcgattggtgcgttagctattcccgatgttaatatgtatttaccgattatgttggggatgagtgatgatgcaatgtcgactggtggcggcacgatgcgagccgaccaagtaatgggtaagggaaattatcctcttgcaggtcactacatgacagcaaaaggtattcttttctcaccacttgaagatgttaaaaaaggtgagttagtttatttaactaatcttaacaaagtatatgtctatcgaatttatatgaaaaagattgttgatccaactgcggtttggctagtcgataatactaagaagaatattgtaactttgattacttgtgctgatggcggtaagaatcgttgggcaattcggggtaatctgattaaaactgaaaaggctaacaacaataatcttaaggtttttaaattaaaataaaaatttacaatctttaatcagatttagatttgcgataaaattataaatagattttgtaataaagacactcaacaatgagtgccttttcgttttgatgagagaacataaggtgtttgataattaatgaaatggcaagaaagaacagctgatgaattagcaccagacttgattgagaaatatcaactaggtcccattgcagccaaactttttgcattgcggggtattaatacagacgaaaaacttgatttttggtttaatgcaacagaagaaaatctggctgatccagcgttaatgcatgacatggataaggcaattaaccgaattaatcaagcaattgatagcggcgaaaagattacaatttatggcgattatgatgctgatggaattactgcaacgactattatgactgaaaccctaagcattttgggcgctgatgttcattattttattcctaatcgcttcaatgatgggtatggtcctaatatggaccgctatcaagatattgtagctgatggaaccagattgattatcactgttgataatggtgttactggggtcgaggaagtcaaatatgctcaagaacataatgttgatgtaatcattacagatcatcatacttttcaagaaaagaaaccggcagcttatgctactgttcattgtaattatcctggccaaaaatatccttttgatgattattgtggtgccggagtagcttacacgatttgtcgtggtctaatgcaggatactatgcctgagctgctagatttggctatgatcggaactattggcgatatggttaaggtgaccggagaggggcatattatcgttaagcgtggtttagaaatgcttaatcagacagatcgtcctggcttgcgcgctctaatcaaaaatgctggtttgactttaggcagtattaatgaaactgatgtcggctttaatattgctcctcgattaaatgctgtaggtcgattagataatgccaacttggcagttgagcttttgctaagtgatgatgaccttgaggcccaaaaaattgcagataagatcgaagaattaaacaataaacggaaagaattaaccaccgaagtctatgacaaatgtatgacgttaattcataaaaatagctggcaaaaacaaaatactttggttttatatgaccctgaatttcacgaaggtgtgttaggtttagtagctaataagatcgttgaaaagacacataaacccacgattgttttgactaaaaatgatgcaggtgaggttaaaggctcaggtaggtcctttgctggtttcaacttgtttgatgctttaaatccgatcaaggatcaatatttaaccaaatttggtggccatgattttgcctgtggtttatcattagaagaaaatcagattgcgccattacgggaaaaatttgaagatgactttcatgttgaaggtggtcttgagactaaaaaatatgacatggaattgcctatgcagggcttaactccgcagacactagcacaaatcaatcaagtaggtccatttgggacaggtgacacgcagccaatctttagtatctctaatccaacaatcactcatttctttaaaatgggtaaagataagaatcatgtcaaatttacggttgctaaaaaaggcggtaacttatcagttattggatttaataaaggctttttgaataataatcttttgccgtttatttctcaaatttttgttcaattatcattaaatacttatcgaaatcaagtttctttacaaggaatcatgaccggactagcttttgcttcaccaaaattggcagtgccaacgccagttgttgacttacgccaagagaaatatgttatgggtttcgcggaccgctacctgttatttgatcaaaaaaatattccgattgttcgcaaccgactacagatcgatgaagacaagatctctttagttaaagattatgatcaaactggtgaaacagttgcattattagatgtgccacgcaatcagattgaattaaatgctgcattggagaaagattatcaacaaatctatttacgctttttgcttgatcaattgcctgttgaacaaattcccgctaaaaattattttggtgctgttttaaaatatatttatagtcaccctacgttaaagccagcagattaccgtacagttgcaccttatttgggactagattatgatagtgtgcttttcattttacgagttttctttgaattaggctttgtaaaattggatgaaggtaaattggtaggagagccttctcctaaaaaacagccgctgacagcttctaaatatttaatgggaacttcttctcagattaaatttgttaatcaactaagaactatgcctagtcaacgtttgattacatatgttaataatttgacaaataaatagataactattctgttttcagtgcttttatcgttaaaatttgttaaaatatactggtcaaaagcgtttgaacacaaacacagagcattttggaggttatgcttcttatggcagttgattttagtaaatatattgcaagtgttaaggattttcctaacaaaggcattgtttttcgcgatattacaccaattttgcaagatggtgaattgtatcgtgccgctactcatgaattagcggaatatgcaaagagtaaaaaagcagatgtaattgttgggcctgaagcacgtggttttattgtaggttgtccagtagctactgagttaggtttaggttttgtacctgcaagaaagccacataagttaccaagagaagttgaacgtgcttcctatgatttggaatatggttcaaacagtttggaaatgcacaaggatgcgattaaacctggacaaagagtggttgtctgtgatgacttgatggctaccgcaggtactttaagagcttctaaagagctaattgaaaaccttggtggtaagttagttggtgccgcattctacatcgaattgccagatttacacggtagagataaattacctgatgttgatatttattcacttgttcaatatcatggtgcttaaaatagaataaataaaaagagggaattaaatcaatttgaactgagacctaaaagttagacacttttaggtctttttctacgtaaagtcaagcataataagaagtttggcttcattttttgtttaaatttcaacttaaacatcttttagtgtcgatttatttttttagttagacacgacaaataagcccagatccatatctgatttttgggcttagcgttataatgtacttgatcaattaattacgactaaagtctttttgattatgtgtggctacgttgtaatcatatggttgatcattgataatcagggcataaatggttctgattagtttatgaattgaagcaatagctatctttttgaaccctttggtttgagaggatagctttttgctttcataataatctgctatatgacacggatttgtcttagctgcattatcaatttgtccaatagctcgataaagcaacttacgtgcgactgcattgccatgtttagtaatacttaaattagagtccatttctcctgactgatatctgcctggatcaattccgataaaagcattgattttattaggattactaaatctgcgtaaatctcctaactctgctaaaactctgacagcagtggtctgtgcaaagcctggaatgctttctaggttttctaaatcatgattaggcaaagacttcgctaacttaaccattcttgcgattaaattttctctttgatcacttaaattaagcaatctgtgtgcataatactgcacttgctcgacttctatgctagagcaagatacaactggataagcttgataagctaattcaattaatttatctgcagtccttagagcgtgtttaaaagcaatcccctttaagctcattaaccagttaataagctgttttttatcttctcttcttactaagtcacaatgaggatatcgcacaactatttgccagtaatttttacctttagcagaagaaaataaattttcaatttcaggaaaagtcgattgtagagcttggtgaagtcgatttttagctattaccaagtcacttgtcagctggtcatagaagcggctcaaagcattaagctgcttataagtttgggattcgctttgattaaccggatggcgataaagtctttgaattaaagctaaatgataagcatcagttttatcggtcttgttgtagcgtagccccatattcatctcttttttggctttaagcggattaataacaacatattcatagccgtagtcttccagaaaagcctgcagtctgcgtgaataaacaccggtagcttcaaaaataatttgcggatgtttagaaaaagcggttaattcatgaagcaattgaataaaaccaggacgattattagtaatggttagttcatttttgctttcaccaattagttcacaaacagtagaagtagacttgcttacatcaattccaaaagtaacttgcataataaaaacctccaaaacttagtagtaaaacgtatttacttaagaaatcagatctaattttctaaactcgacatctagtgtccacattcttcgaagagactattgaaaacttaagtaaaactgccagtttattatgcgacatcaagtgtctaaagacctcagggcatatcgttttaccactactttaattctacaaaagaataaaaatagtgaatcaattatcccgtcggataactaattcactatttagcttagaatgtttattatttgttaccgattaatttaaattttgaccatggtttaataaagtcgagcaggaataattcgtctgatctaatagaaccgactttgttcatccttgactccttatgaggttcaaggacaatttgtagttcatttttgtaatgaccaaagttgtcgttaccaatgataatatctccgcgttggaattctacattgttgtcgtgtactggattaggaatatctgcataagttacacggggcatggttgaacgaattacatccttagtgatatcaccacgacggaaatgttgaggcgcttctacgatagttttctcaatcttattaacatcagtaacgtagtttacgtgcaacatcaattgatagcgattaactttagataaggcttttaactcggcttcactggcataagcattaccgatgattacatcatcaatcaacccagaagcccagagatgcattgcttgcacatcaattggtaaattacggtcttgctcaagcgttggtaaaccatcttccacgttccaaggtcccatttgacctacttgacttgagacaaaagcggctgaatgaatgccaaactttttgaagcgttcagaacaagcgataaagaagtcgtaaggtaagccagtaccgcgttgaggataaaaattgtgacagccataaataaacggtgtattagcttggtaagaaataatattgttaagatagtcaacattattactcatgttgagttcaatgattagaccatatgggttgtaagaaagcattgcttcaattgcaccatcaaatgttgtgtcaagacggatgcctgctgcaccaatatcagcaaaaaatttcaggtcatcatagctgacacctagttgtttgaagattgcaggattaacatctaaaaaagtttgaaatcccaatttattgccatattcaatgatttttttatacttagctttggtttcttcagggctgccttgtacttcaagcatactcatgaagatacgagaaaagccatatttgtgagctaagtccagatagtgagcgttgccttcaaatttgctgtggcctggataaattgacagacctaaagatctcattgtcataatagtacctcatttttgataattgtctataccaattatatgatattttttattgtaggtctagtccaaagtgaccgagatagtttatattttggtagggtgtctcgctacgtttttaattaaacaggtgttatatttaaagtacagggtatgtgttaagaaggagaaattaagatggataattttgatcaagaatctggtcaacagcaatatgctaatgattcaggattaaatgttttttagcaaaatatatggttatatggccttagcggttttcgtttcagcaattagtgcttatttgacaatgacggtttttgcgggacctatctctgcctttattgcacaacaccaattgtttacggcgttacctttgcttttattgcaggtgcatatagtggacaaaatattgcttcagcatttgtagcttcggcaaccgtctttgtaacaatggcgattttaggaacaattaccaaaaaagatttgagtcgaatagggtcttatgcttctgctgcgttaattgggttgattgtagccatgttagctaatttgtttttacataatccaatcattgactacgttttttcgattattgctgtgattatatttactattttaactgcgtgggatgcacaaagaatgaaagatatttatttacaatatggtgatgatctttcaactaatgggcttgcagttttaggtgctttgcaattatatcttgattttgttaacttgtttttacaatttttggatatttttggtgcaaatgaagataagtaattaaactagtgagactgtaaaatagtttgtgtaaggatgaatgattccttaaatttatttctttaaacattagaaaaaggagttcctttctcgtatgattggtttgaacaaaaaaacacatacagaaagaagaactccttcatgaatgattttaccaaagattttgctcaagctctattcaatccagacaaaataaatgatttattgcgcaaagagctacaacaggctgttaataacttgttagaagctgaattgactgcctttctgggctatgatccctatgccagaaatggctggaatactggcaactctagaaatggtgcttatttccgcaaagttgatacgcaatttggcccaattgaagtgcaagtgccccgggatcgcaacggtcaatttcatcagcacacgctgcctggctacaagcagcactcggatatcttggaaagcatgattatcaagctttactccaagggcgtgaccaccagggaaatagccgatctaattgaaaagatgtatggcagccattacagtccagctcaggtatcaaatatttccaagcagatgattccaaaggttgaggcttaccacaaacgcaagctaagcgacaagtttttctgcgtctatttggatgcgacataccttcctttgcgccgagaaacatttgagcgtgaagcagtctatattgccattggcatcaagcctaatgggcacaaggaggtcattgactactgcattgcgcctagcgagaacattgaagtctggacagatatgcttcaaaacatgaaatcccgaggcttaaagcaagttgagctttttctttctgatggtgttgttggcatgaaaacagccttggccaggacttatcctaaagctcattttcaacgctgtttggttcatgtcatgcgcaatatctgcgctaaagtacgcgtcgacgatcgtgaaaagatcatgaacgaattcaaacaggtgcatcaacagacaaacaaagaagaagccacagctgtcctgcatgacttctataccaaatggggcaaggtttacagccatgttatcagaagcttgaaagacatagaaccagatctgctggtcttttataactatcccaagcagatcagagcttcaatttattcgactaacatgattgaatcatttaacaatgtgatcaagcgcaaagctaagcctaaggcagagtttccaactgaacagtcgcttgatgcttttattggcattcaggcaatgagctacaatgaccgttatttcaatcgaattcataaaggctttggtcaggttcaggacaccttagaatcctactttgattaaataaataattaaaaaatcaatttacgagaaagaactatttacacaaaagatttgacagtttcaaactagtttctaataaacgtaggaacacttcatatataaacgtatactatataaatatagtgacatattaagggagtgtttttatgaaaagatgcaagaattgggttgtgactattgttgcatttctgatgttagtgggagaaatcagtgttctgcctgcaaatttgcaggggtcgacatcagttgttaatgcagctattcatcacagaaggagaaagcatcaatatcgtgataaaactaagatttataccagtaattacagaattgttgataataaacgatcaaaaatctttcacgtaatgcgcggtcataattatcgaatgaatcgtgaaaatgcagttttcttcaagagtaaagcagcagcacgtgcagcaggatatcgtgaatcaaaaagataaattaaaagacttctaagagttcaaagttcctagaagtcttttaatttataaaatttatggtaataatctacctgtttttcatcacaggttggtaaattaagtcgattattatggcagcaataatcgctacaattacagtaattgctaagttttgaatggaaatctggaccattgcccaaccacaaagagctaagataaaggtcaatagaacatctgcaatttgaacactaccaaccaacttggatgggtaatcttgccaaaagtacttacgagttctagtaatcaaaacaatcaacattgcgctaagaactaggtatacgtaaaccatagtagaaacagcaccgtgactccaaccgtgtgtgtttaagaaccaaacaaacccaataccaattaaagtccaaccagcagctagtgaaaaggcgatcttagcaagcttagccatattccagttttctggcttataagtaatgtgagtcctgtcagttccaatcatcatcgtaaccatattgttcataatggtatagataaccattgcattcaaggccattgggatgtagtcaaagaaaagatagccaaaagttaacagcatcgttaattcagcagttctagcaagcttggttagtgaccaagtagtcattctttggtatacgcgatgtccagcgtctaaaattttaacaattgagcctagaccatcgtctagtaataccattttacccgaacgcttagctacgtcagcagcatttgaaactgcgattcctacttcagcttgttttaatgcaggcgcgtcgttaactccgtcacctgtcatccctacgatatagcctttttcttggaaaagctttaccatcttgagtttatcttctggtaaaacatcagcaataccggccaaatcattaatatcagtattttcattgaaatcgtgaatcgaaattactttaccagttaaatcaacttgttctgccactgcagcagcggtcttttgattgtcaccagttaacataattgggcgaacgccacgtttcttgagttcagccaaagctgctttagagtctgttctaactttatcttgtaagatgaagacaccagctaacttatcgtcaatcaagactgccactgagcgtcctgccttgaaattaattccagaaatttcttcatcggcatgtttatcgatcaaagataattgcttaaatgaaccaagctttacattatgtccagcaacatcagccatagaataaccagtgtcagaagtaaatggagtaaagttttcagcattcatgactggaatgttattttctactaagtattcatcgattgctgtatcgataataccagcattacgtttatcagttgcggctccagctaaagcaagcacgtctttgtcaggcaagtcacttagatcagtccaagcggctacggcagttttgttttccgtaattgttccagtcttatcaagtaaaagcaagttcaagttagctgcgtcctgaattccagttaggtcagaagtcaggactccttctttacttaagcgggttgcttcaaatgagttggataaagcaaaagttgatggcattgctacaggaattgaagcaataaacatcattgccaggaatggcaacatattaataaaggtattgaaattaccgcctttgaagaaggaggcgataataataactaaggttaaaacaccatctagtaagcaaaggtagtagataatcttagtcaaaagttgttgtaagtgaccaggagcagcggaattgttgatcaaattaatcgtcttaccgcttctagaatctttacctgtagcagtaacaacagctaggccatcaccttcaacaactgtagtaccggcaaaggcggtgtcatcaattgctttcttaactggtttagattcacctgtaattgagctttcatcacaagctaagttaccgtcaacaattttaacatctgctgcgagtacgtccccgcgtttaagtgagattaaatcgcctttaactagttgtttagaatcaagtttgatccacttgccatcgcgttcaactgatacagtaggagtcaacttgtgtgaaatattatttaaaactcgtcttgattgctttttcttagatgcaccgttaaatgcagcaaataaaagcatcaacaacacgaataatgattggacccatttgcccaagatacattctagaattaaagcagcttctagaatccaagcggataggttccataacttagacaagaactctttaaagaaattgtattcaggctctggtacttcatttaagccatcttcttttaagcgcttgtctgcttcggcttgagttaagccgtgaaatttatcagacattattttccctccaaatctaccttaataaggtagcacagatattgctatgaataaaatactaaaatacaatataagatattaaatattttaatatcactatcaattgaaataaaaaaaggataaataatatgaatctaaaacagttacgttattttctagttgtagcagaagaaaagcagattacagcagctgctaagcgcttgtatattgcacagccaccattaagctatcaattaaaacaattagagaaagagttgggcgcgcaattatttaaaagaacggcacatggtattgagctaactgatgtgggacaaatttttcaaagctatgccaatgaaattatttctctagctcaaaatgctgaaaaccaagtacataagactatttccggtgaattgggaacgattgcaattggaatggcatcttcctcaacgggcttgataccaatgaattcttttaatgaattacgaaaatattatccggaaatttcttttgatatttatgaagataatacttatggcatcctggataaattagaaaaaaagacaatcgatctaggcattgtacgaacgccttacaaccagacaggtttaaatactaagactttaacaactgaaaaaatgatggctattagtgtagacccagattttcagcaaaaaaaagaattacgcattaaagatctagcagatcagccattgattatttatcgtcgctttgaggatatttttaatcaaacttttgcacatcatgggcttaaaccattttatgcggttaagtgtgatgattcacggacagcaattacttgggccaagagaaaaatgggagtagcgctagtaccagaatcaattgcgacaacttatgcccaagaaaatatgatcgcaattaaacatgctaattggataacacatttgcagctggtttggcgtaaagatcatcaagttacacctttaatgaaaaaaatcattgctgcaatatgataatactgtaacttttacctaattgatccataataaatgtaaacgggtacaataattaatagaaggtggttgaatgtcgagtccgattcatgtttattcagaaattggtaagttaaaaacggtgatgttacatcgaccgggaaaagaactagaaaatctagccccagatattttgcatcgaatgttgattgacgatattccttatctgaagattgcccaagaagaacatgatgcttttgcgcatgtattgaggcagcaggggatcaaagtattatatcttgaggatttattagcagaatctttaacagatgagaaagttcgtcgggcattcttagatcagttactggatgaatcaagtattaaaaaacaggatcctttgcatcaattattgctgaactatctccaagaattgctaactaaggaaatggtaaaaacggtgattgctggaattagaaaaagtgcgattcataattctaccccatctttagcagatttggctgaggacccagattaccctttttatcttgatccaatgccaaatgtatattttactcgagatcaacaggctgcaattggttcagggatgaccattaaccggatgactttcagagctagacgacgtgaatcattatttatggaaacaattttgaaaaatcatcctgatttcaagaacgcaactattccagtttggcgtgaccgttatcatcatggtcgccttgagggcggggatgaactagttctaaataaccatgtgttagctgtaggtatttcacaacgcacttctgcaactgcaattactgacttagctcataatttatttgatcattcaagttatgatacgattttagcgattaagattccgcacaatcatgctatgatgcaccttgatacagtttttacaatgattaattataatcaatttacggttcatccctttattttagataaagccggcaaaattgatatttatgttctacagcccgatgatcacaacggtgtaaaaatcacagaaaagaatgatttggtgcaggttttgaaagaaaacttacatttaagcgaattggatttaattccaactggtggtggtgatccaattgccgcaccacgtgaacaatggaatgacggctcaaataccttggcaattgcaccaggtgaagtcgttacttatgatcgtaattatgtatccaatgatttgctaagaaaacatggcatcatcgttcatgagattcggtctagtgaactctcacgtggtcgtggcggtcctagatgtatgtcgtgtccgttgattcgtgaagatttataagaggcaaaaaatgaaatatttacaaaatgtttttcaaggtagaagttttctcgattgtaaagactatactccagctgaaatttcatatttaattgattttgcattacatttaaaagaacttaaaaaagagcatatcccacatgaatatctgaaaggtaaaaatattgcactactttttgaaaaagcctcaactaggacgcgatctgcttttgtagtagcttgtaatgatttaggtgctcatccagaatatctaggcgcaagcgagatccacttaggtaaaaaagaaagcgtcaaggatacggctaaagtcctaggctcaatgtatgatggaattgaatatcgcggttttgctcaagaagatgtagaagagctggctaaatattctggcgttcctgtttggaagtgggtgatggccgcgataatgttgccgacagtcttttagtttgtggctcaatgttaggtgttaatgtacatattgttacacccaagcctttgtttacacatcctgatgtacaaaaaattgctcaaaattttgcccaagattcaggttcaaaaaatttgatcacagatgatattgctcaaggcgttaaaggagccaatgttgtttataccgatgtttgggtttcgatgggtgaaaatgattggtctgaacgaattaaattattaaagccatatacggtcacaatgaaaatgatgcaaatgactggtacaccagatgaccaattgatctttatgcattgtttgacagcttttcatgatcgaacaactcaggtgggagaagaaatctatgaaaaatatggcttaaatgagatggaagtaactgatgaggtctttaattcaaagtatgcttggcaatttacagaagctgaaaatcgattgcattcaattaaagcagtgatggcggctactttaggaaatttatttattccgattgcctgtggcggtggtggcatccttgttattgtgaaagatgggcatctcagaggtgttgccggcgtaattcataaagatttttccgctgctaaaatggcagaagatatcaacgctgatgaattagtaattctaacaacggtggatcatgcatttttgaattatggcaaagaaaatcaacaagcaattggtaaaataaaagttgaacagctcaaacaatatctagcagcaggttatttcgcagctgggagtatgaagcctaagatagaagctgcaattgaatttgtagaaaaaacaggtaatttagcaattatcacctctttgagcaatgccaacaaactagcagacggagtcggcacaatcatttataattaactgggtgataaaaatgaatatttttaatgaaggaaaaaagcaggatattgcccaagttttagcagctaaagataggcgagtagctgtacaacataagatttttaataagtatcctaatcaaactctagtcgacattaatatgaatatcccaggaccaatcaagaataatcgctatttaactaaaatgtttatgttgggtatcaatgagctggaaaatgcttggactaacctaggttatcattttaaattggtgacacagcttaatgatgatagtggctgtgaaaacttttatgtattatctttgtcaattgaaaaagtaaagcgctcaacaattgattttgagaatcagatatcattgggacgtctctttgatgcagacgtgttggtaaaaaataaacaagctgcaatttcacgcagagatttgggcaggcagccacgtaagtgctttttatgtgatcgccctgctaaagaatgtgctcgtagccggagacattcagtggaacagatgcaggcatttatctctcagctttatcaagaatacgttgcgtaaaataaaccgggattttatgattccggtttatttttatgaaaaatctagttaaaaatttaaaaaatgaactaaaatagtaatgaataaatttatagatgtacgtataggaataagcatggaattaaagaaaaataagaataatttaaagcaaattacggcattaattcaatatgcatttttgaaaaataatgatttgactaaagacgaaaattttatgagtcgttatgatcatagtacaggttatggctattttgataaggaaaaattagctagctatattatggttaatcgatttaaaagtgatgtttttgggcatcatttaccgatggctggaataggttatgtagcttcatatcctgagtatcgtggccaaggtcatatttcccaattaatgaaagaaattttgcatgacttacataggcaagatattccgtttgctaacctggcaccattttcggagagcttttatcgccagtacgggtttagcaatagtatttatcaaaaagaatatcgctttgatggaagcgcattgcgtagttttaaattaccacgttctggtcatatagtgcgtggcaagtgggacaatttagctgttcaaaatggtgtgattcaactttatgaacgtcaactgcatactgatgatgaacgtaacacggttgtacgtgaggcatggtggtggaatagacttgattcttattatcatcaccgcaatgtagccgtttattttgacgcggatgagcggccaattagttacttgatttatcgcattagagacaatacttttttagctgatgaaatgtacgcaattacgccgcagggattactgagtatgtttggttttatgggttcgcacgcgggcagtgttaagcaatttaaaatgagcgtaccagagaaatcgttacgagctgaactttttcctgaacaaaacgaactccaagttgatttgcgtccttatatgatgagtcgaattattgattttgaaaaagttttggcttgtatgcggccaatgcaagaaggtgattttaatctggaagtcaatagcgatgaacagtgtccttggaatattggagtttggcaattaagtaatcatggacgtaaggtagcggtagaacgtaaggaagatgcattggttgatttttcgggatcaattaccgcgtggacccaggtgctattaggtagactaaccatgaatgctgctgttaaactaggattaattacagattaccgcatcaaaaaattagatttcgttaaaggcgatgtatcattttatgattatttttagttgtgaggttaaaaaatgagtaaagaaaagaaactcaatttaataaaattatttggcattgtagttagtggtttgaatttgatcttttttgccttgatggcacttaataagcatgaagatactaaggataaaagaagagtagcagaagaaggacacgcaccgctggatgaaaaataaaatgacggaattaaagattgcatattttgaccaattaggtcgtaaggaattagatcaggcagtgcagcattttgtgttaaaacatcctaatgtagatgtaaaactacttgcgactagtcatgatggtgcttttgcaaaactgaatgaagatgaagcagacatagcaatcaatgatttgcgtgacgagaatcttaactttgatgaaacagaattgactcaagctggtgtaatggcaattttgcccaagggaatgtatcctaatggcattcaaatgattgaaaaagacgagctcaatgatatgacttgttttattgtggctaaacctgaagaagaggttagtgagctacatttatttaaagatttgtatcaaattggcagtcaattcatcgcttctaactcggtcgaagaagcagcactgttggtcgcctctaggtctggctattttattttaaatgagaatacggctaggttaattaatactacagatttgcagccacttttcttgcttgatcatggtcagttaataaagcaaaagataatggctttttataagtcaaattcagcgttaagtagtgagtttataaagctattgcagcaagaatattaatctgtaaagttaaaaatatcttgtctaagtactataagatactgtaaaatatattatgaaagcggactcatatattttacattctggagatgatttttatgctaaaaagaactttgttacctttaacatcaatggtacttgttttaggattaactggtttggctagtcaagttgagactgttgatgcttcaacttatggtaatggtgtacaggttactattccaaaaaagatgcagggtacttggtactcttatgatcgtaatgcacataatggcacaaagatcacctttactgaacatactgttaatggcaaaccaatatttacccaggaggcttcgacaattagtgattacttcaatggtagaattgctaaccagaagaactttgataaggtaacgcaaaactggatgtctggtaaaactaccaaaatgaagaatgatacattctatgagattgatccgtggattacttttgaaaattggagtctttatcgagtggtaccacaaaccattaatggtaaaaagcataacgtgctggtttattctagtagatatgatggtggtaactacttcagaagcaagaaattagctaaaaaaatgaaggactacaagtttaagaaagttaattacacgttatagttttgtgacatcccttaactaagggatgttttttactaatagacgcgataaaatttagtataataatgacaaaattaattcttggaggagaagttatgaaattaaaacaaacaccaattttgcgtttatataaactagaaactaataaagaggatcatgcaaagttcgttaaggcagggcaacataatatgcttacttctcaagaaaacgaaccaggcacattgtttatgcagacaagtcatgacgaagaaactactaattttgtagtagaatgctatcaagacgaagcaagttatgatactcatgctaattcaaagcaatttaaggattttactgacgttgctaaagatattttaactagtcgagtaaaggtagaattgtttccggaatttatttctacaaaggcagaaaaactagcagttaccggatcaaatgattatgttatttatctgactgaaattggtgtttctttaggtaagggcgatgagtttgctcatgctgtaatgaaagaaatgaaaacggcagtcgaagaagaaaaagatattttggcaatgattgcaggaactgttgccgatcaaccaaatgaatggttagctattgaagtttatcgtaataatgaagcttacaagcagcacttggaaactaagaacttcaaagagtatttgaataatacaaaatattgtgttgaaagtaagagtttacgtaagttgcaaccagatgtaattgttgaccaaggtgcaattttctaccaaccataaagaataagacgaaaagaagaccaggctatgtggagtacataacctggtctttctagttagaggggaaaagatttattaacatacgcgtggtgctagttaaatcgttttagttaataaaaaagtccaatcggactagactcaagttgtagtatcaaaaagaaaagagtctgatctgattgaactgccttaagcttaagcgttttagccaccatttacaagttagttttaaagatttagtgataatttgtcggcactggtatcgtttgtatgcaccggctgagtttactcatcggcgaaatattgatcaaattaaaactacggacagtctgattttggctttacttatctggcaagctaagacaggaattgaatcacaaagaagattctgtgaatgtttcaattgtttatcacactcacgttttaatcgacgttcacgtcagctattgcaattgatttatcagatacggcaagaaatgaataaaaaggttgacctgaatggacagttcttgatcattgacagctttccggtacctgtttgccaaccaattcgcaactatcgtgctaaaatttttcgcggttatgccaacattggttataaggccaccaagaaaatttacttctatggtttcaaagttcatgtcattgttagcgatgacggttacattcttgattatgtcgtaacaaaagcatcagttcatgatgccagggagacagttgaactgctggaaaatacccatccatctaattactatcttcttggcgacgaaggctatttaggcaaagaactgcatcaacagctaaaacaaatgggttatgaactttggacaccatatcgtaaaaatatgacaggagctaaaaagcacaatgatcatcaattgatggctattcgcagaacaattgaaagcgacttttcgcttctgacctattacaatgccgagaacaatcgagcacgtagtctgataggctttcaaagccggttggaaattgcaattttagcttataatttggcttattgtctagaacgatttaactagcaccacgcgtattaacatatattattctggtttttagtggcgatgttttacctttgctactgctggtttattaattaatactgagctgatggccattaaaccaagcgttaaaaatgatccaccaattaagagtagtttaatcaaggttctcattcctttcatcttaattgatcttataatagcgaaataatattaagaatttatatgtaaaacctaatggattagttaagaaaataaaactagaaaaaaggctgaaactgtcaaatcttttgtgtaaatagttctttctcgtaaattgattttttaattatttatttaatcaaagtaggattctaaggtgtcctgaacctgaccaaagcctttatgaattcgattgaaataacggtcattgtagctcattgcctgaatgccaataaaagcatcaagcgactgttcagttggaaactctgccttaggcttagctttgcgcttgatcacattgttaaatgattcaatcatgttagtcgaataaattgaagctctgatctgcttgggatagttataaaagaccagcagatctggttctatgtctttcaagcttctgataacatggctgtaaaccttgccccatttggtatagaagtcatgcaggacagctgtggcttcttctttgtttgtctgttgatgcacctgtttgaattcgttcatgatcttttcacgatcgtcgacgcgtactttagcgcagatattgcgcatgacatgaaccaaacagcgttgaaaatgagctttaggataagtcctggccaaggctgttttcatgccaacaacaccatcagaaagaaaaagctcaacttgctttaagcctcgggatttcatgttttgaagcatatctgtccagacttcaatgttctcgctaggtgcaatgcagtagtcaatgacctccttgtgcccattaggcttgatgccaatggcaatatagactgcttcacgctcaaatgtttctcggcgcaaaggaaggtatgtcgcatccaaatagacgcagaaaaacttgtcgcttagcttgcgtttgtggtaagcctcaacctttggaatcatctgcttggaaatatttgatacctgagctggactgtaatggctgccatacatcttttcaattagatcggctatttccctggtggtcacgcccttggagtaaagcttgataatcatgctttccaagatatccgagtgctgcttgtagtcaggcagcgtgtgctgatgaaattgaccgttgcgatcccgaggcacttgcacttcaattgggccaaattgcgtatcaactttgcggaaataagcaccatttctagagttgccagtattccagccatttctggcatagggatcatagcccagaaaggcagtcaattcagcttctaacaagttattaacagcctgttgtagctctttgcacaataaatcatttattttgtctggattgaatagagcttgagcaaaatctttggtaaaatcattcatgaaggagttcttctttctgtatgtgtttttttgttcaaaccaatcatacgagaaaggaactcctttttctaatgtttaaagaaataaatttaaggaatcattcatccttacacaaactattttacagtctcaaaaggctggttagcacgtaaaatagaaatagagtcaaagtctagtgcaactgcgcataaaataaagcagtatcgatgggatgctgcttgttttggttaaaaaatagagaatatgcttgtagcccttttcgtaaatagcgttaatgttgtaaaatggaaagtgcattaagtttattaatgagaaaattgatgtattattgcaaaataggccgtaatggccctttttgttgtgaaaaaattaaaagaatataggattggaaatgccaggaatagtagagcaaacattattagaacaacaaaatattgatttaaatgaaatggtaacaatgaatcaaatgattgatcaattgttgcctaatgcaagtaaagaattacaacaaaaactaaagattaaaatttataactttgtgcgtacacgtaaacaaccaagtattactgtgcgaagaagaaaatattttaagccggctgttgctaaattaattattggtaatgtacaagattacgcagatgcaattgaacgtcgtgctaaggaagccccagctaaagaggatgctactgataagaggccagcttctaaatctaagcgggttaagacaattactaagcgtaagattttagctaaagttataaagaatgataagattgataaatctattcaaaagaaattagaggataagattgcttcaattgtgaagaccaactttattaagccagttaacaagcggggaagtttttcggttgaagatggtgaaaaagttatagctgaacttagtcctttttatcaaaatatcaagattgatcaaaagtatcgcaagaatgctgaaaaagcggctgaaaataaggaaacagaaactaaagaaaagcctgagcaacattctaaggatcagaatgaaagtcgtgaaggtcaatctaaggactttgagcgtaagaataatcagaagaatagcaataatcgaaataataataatcaaacgcaaaatcaacgtaagcgacaaaataagcatccttttgagatcagaagagaaaataataaccgctcacgtaataatcagtctaaccgccgctataataatcgaaataattatgataatcggaataattatgaatttgatgaagctagcggtttgcgtgaacgctacaatacagtaatcagaaattacaatcaactggagcaaagatataatgctttgcaagataaatataatcaggctttagatgataaagctagattgatcgaagaaatgggtaagaagaacgaagacttacgtcgtgtattgatcgacgttttgcgaaaaatgtagtttttggtaaacaaagagactagtagtcaatttgaattgattactagtcttattttatgtttatgaaatatgatttagcttaaaaattaaaaaaatatgtgtaaaaaattatttttgtgtagtaagattaaaggatgataaatatttttattaatgattaatggaggagaagtatgagtttaaaagagctatttaaaagcaatgtgtttcgaggaaactgtcaaatcttttgtgtaaatagatttttctcgtagattgattttttaatcttttatttaatcaaagtaggattctaaggtatcctgaacctgaccgaagcctttgtggattcgattgaaatagcgttcgttgtagctcattgcttgaatgccaataaaagtatcaagcgactgttcatttggaaactctgctttaggtttagctttacgcttgataacgttgttaaaggattcgatcatattggtggagtaaattgaagccctgatctgcttaggatagctgtaaaagaccagcagatcaggctcaatctctttgagatctctgatgacatggttgtacgctctgttccacttgtcatagaaggcgtgcaagactttgatcgcagcttctttatttggctgttgatggatttgcttgaattcattcatgatcttttcacgatcgtcgacgcgtactttagcgcagatattgcgcatgacatgaaccaaacagcgttgaaaatgagctttaggataagtcctggccaaggctgttttcatgccaacaacaccatcagaaagaaaaagctcaacttgctttaagcctcgggatttcatgttttgaagcatatctgtccagacttcaatgttctcgctaggtgcaatgcagtagtcaatgacctccttgtgcccattaggcttgatgccaatggcaatatagactgcttcacgctcaaatgtttctcggcgcaaaggaaggtatgtcgcatccaaatagacgcagaaaaacttgtcgcttagcttgcgtttgtggtaagcctcaacctttggaatcatctgcttggaaatatttgatacctgagctggactgtaatggctgccatacatcttttcaattagatcggctatttccctggtggtcacgcccttggagtaaagcttgataatcatgctttccaagatatccgagtgctgcttgtagccaggcagcgtgtgctgatgaaattgaccgttgcgatcccgaggcacttgcacttcaattgggccaaattgcgtatcaactttgcggaaataagcaccatttctagagttgccagtattccagccatttctggcatagggatcatagcccagaaaggcagtcaattcagcttctaacaagttattaacagcctgttgtagctctttgcgcaataaatcatttattttgtctggattgaatagagcttgagcaaaatctttggtaaaatcattcatgaaggagttcttctttctgtatgtgtttttttgttcaaaccaatcatacgagaaaggaactcctttttctaatgtttaaagaaataaatttaaggaatcattcatccttacacaaactattttacagtctcgtttcgagcctgcattattatcttattgtatgttttatacgcattatttgggagttttagtgaatatttatttaaatatgctctgaattcaattactgctggtaattttaatacatatgtttattggcaaataatgcagtttgttttagcattattcacttcgttgcttttaccaattactaccgttgttttcactaggcagacgcaaaactatctgcataaaattcggcaagaaatcatgcatcattactattatgaaaaaagtgatgaaaaagtctctagtatgcagaaccgattaacagccaatttaaaaatcttatcagatgattatgctacaccttggattactatcttaagtggggttttagagattgtgattgctattgttttactagcaagcatgaactggattctaattttggttactgccattttagctgtgattacactttttgctcctaaaattatggagaagaaaacatcagctgccacagataaagtaaataaaaagaatgaaaagctgttaaatacaattgctcattggcttggtggattgcaggaactacgtcgttatagtgcatacagtcgtttggttaagcaaattcatcgatcaagtagtgattatgtggacgcaagtaagggtagtgcaaaattaagaagtgtaagttatttgattaatgcttttagcaattcaattgcacaaattggtatgagctttattgctggaatcatatttttgcttaatatgatttcattcggtgattttgcagttgctagtggttttgcatttacgattttttcagcaatttggaatattactcagtcgttaacgcaagttaagtcaactaaggctttacgcgaacagattaccgatttaagaaagcaagttcctgatgaaaataaagataaagtatcagcctacggtcttaaagtttcaggcttgtctgtaaaatacgatcagggggaaacaattttttatcctgattttacaataaaaaaagggcagaaagttttgcttactggcgattcaggaacaggaaaatcaaccttgtttaatgttttgttaggtaagctaaaacctgaatctggtacggtgacctatctagatgaaaatgaaactatcattcctgaaggaaaagctagaattggcaatatgccgcaaaatccagtagtttttcccgcaacgatcaaagagaacattacaatgtttaacgaaaatttgcaggataagcttcaagatgttgttcaagcagttcaactccaatccgacttagccaaaatgccagatggtgttaatacaacaattgatctaaaaagtgaaaatttgtctggtggacaacggcaaaaagttgttttagcgcgaacggaaatacacgagcaatcgtttgttttaatggatgaagtaactagtgcgatcgatcaaaaagctaccgaaaaaatcattgatgaattgctcaaaacagatcaaactattttgatgattgctcacaactttacgccagaattaaaagcaaaatttgatcaagaaattaaattaaaaagtaagaaaggggataaagtaagatgaatttgaaagcttttattaaaaccaatccagttcgtttctggttaactgcaattggttggattattattcctgctttatcaattaccaatacttacgttgtacaagaagagacgaatatccttttaagtcgtaattggactaagtttattttaatcaatgttcttgcttttctgattatgttagttgactatggtgtgagtgctttagttgattatcagcagcaggctcaggtacaagacttaaatgatcaagttagagataaaattgttaagcgatattattatgacgggaaaaagcatactgttgcacagatgcatagactgtaaaatagtttgtgtaaggatgaatgattccttaaatttatttctttaaacattagaaaaaggagttcctttctcgtatgattggtttgaacaaaaaaacacatacagaaagaagaactccttcatgaatgattttaccaaagattttgctcaagctctattcaatccagacaaaataaatgatttattgcgcaaagagctacaacaggctgttaataacttgttagaagctgaattgactgcctttctgggctatgatccctatgccagaaatggctggaatactggcaactctagaaatggtgcttatttccgcaaagttgatacgcaatttggcccaattgaagtgcaagtgcctcgggatcgcaacggtcaatttcatcagcacacgctgcctggctacaagcagcactcggatatcttggaaagcatgattatcaagctttactccaagggcgtgaccaccagggaaatagccgatctaattgaaaagatgtatggcagccattacagtccagctcaggtatcaaatatttccaagcagatgattccaaaggttgaggcttaccacaaacgcaagctaagcgacaagtttttctgcgtctatttggatgcgacataccttcctttgcgccgagaaacatttgagcgtgaagcagtctatattgccattggcatcaagcctaatgggcacaaggaggtcattgactactgcattgcgcctagcgagaacattgaagtctggacagatatgcttcaaaacatgaaatcccgaggcttaaagcaagttgagctttttctttctgatggtgttgttggcatgaaaacagccttggccaggacttatcctaaagctcattttcaacgctgtttggttcatgtcatgcgcaatatctgcgctaaagtacgcgtcgacgatcgtgaaaagatcatgaacgaattcaaacaggtgcatcaacagacaaacaaagaagaagccacagctgtcctgcatgacttctataccaaatggggcaaggtttacagccatgttatcagaagcttgaaagacatagaaccagatctgctggtcttttataactatcccaagcagatcagagcttcaatttattcgactaacatgattgaatcatttaacaatgtgatcaagcgcaaagctaagcctaaggcagagtttccaactgaacagtcgcttgatgcttttattggcattcaggcaatgagctacaatgaccgttatttcaatcgaattcataaaggctttggtcaggttcaggacaccttagaatcctactttgattaaataaataattaaaaaatcaatttacgagaaagaactatttacacaaaagatttgacagtttcgtaatcgggactttctgtattgaaaaaatgaagagataatttgttattgatctcaatttttaaatcttttttgttaacggtaagcgtataacagtgtcgtttgcagataaaaccatttcttaataaaaaatctacgattggattttcatttgaatcaatcatgacttgcaatgcttggtgctctgcttgaactatttttgaaaatggaatatttacagagtaatcacttagattgaattttagataaatatatttgttatgaaaaagattgtgataagtagaaatagtgcctagatgcttatcgttatcagttactttgtagattttaggagatattttttcaatttttgtagtcattttttatccttttgataattgaaattaatttttgatcggttccgtttttaattatgaagttataaatcggttcataattgagcacagggaaaataagatcaggatcaattttaggtataatgtcaatcattgatttcttactaattacgttgagatttttaacttcttgagcatttcttatctttctttttgcttgtgaaggaggataaccttgtccccaaggctgttcaaaaagattttttatagtctgctcaaaattgatttcaccactccaaccccaattaagtcctagtggaaaggagacaacattgccgttattgatatgaccaaaaagaaaagcatcttgtggagtggggatataaccacattgaatattaggaaaagtatttcatgcaagcatcattccttgtccagaagtacatcctgtcacaatgaagtcagtcgccttgctattaattaataatgcgacagctagggaaacttgcacgtaagatagactagccgaactatcttgataaataccaaaattgaatacttgatcattggatcctacagattctttgatatacttctctaatatgaaatttttacttttttgcgatgtagcttgaataatacctattttcatatttttaacctctatagtttattttttgaaagcgctttataatattatataggaagtaaagtaagaaggtgaacgtgatgaaaaaaattattgttggaactcctgttaaattgagccatgttttaatcggtatgattgtggtagttttactttcactatttttgacaggatttggttatcaagcttggtggctattccttattgtactaattttaggtgtatttgtaactttacctacttgttttaatccgtattggcagattagtagcgaaaatattacaattataaattatgatattaacgatgtgataaaattgatgcaactgctagggttacataaaaagagtaagcaagttattaatttatctgatgtaaagaaagctgccgttgtctatcgtaaaaatgtacgtcttagtcctattgactttaatcctgattatttaaatttgattttggatttaggtaagggaacaaatatgactttgacacttggaaatgtcgactatcagcaactaaattcgattatgggtttgttacaagataagaatattgtagtagatgataaacaaaatattttgcaacttttaagagaaaataaaaacttgtttaaccattttcacaagaaaggctggacatcgctataaatggataaagagcaaataattagaaattattttcgagcatggctaagtcctaatcttgaagtagtccaaaatacatttgacgaaaatgctatttatagtgaatgctatggtccagtttacagaaataaaaaggagataatatcttggtttgaaaattggaataaacaaggaaaagtaattgcttggccaatagaaagactcataattaatggtgatacgagcattgccgaatggcattttaaatgtaattatcaaggaaaaattagtgaattcgatggtgtatcaattatagaatttaatgatcaaaataagataatttctgtaaaagaatatcaatcaaagtccaaacattattatccctatagtaaataagacttttaactgttaagaggttaaaagtcttattttgaatatgaaatcttttataaactaatttctgtggaaaaaattaccaagccagcttcgtttctttttagcctcttcttttcgtcgctgttcacgatcttctaacattgccttagctagcatatcaactgtttgagtcaattgtgcttggttatctctttgttgcttatctctaaatgaactactgttttgatacttattcattaacgtatcatcatcaagccatttatcaaagttttcaacatcaataataaaaccggtgctagtttgttgcgatgcaatgtgatattttctaggcaaatatttaaagtagcgatcaagcatagtagaaccgctgtttttcgccgtttgatcggagattttattgaaaagttctttattgatttgggcttttagccggtcatcttgtttaataaataagatatcgcttccgatttttgcttgattgattaacattccccaatcatttcgaccaacaaatagggagtaatcgtaattttcttcaaaatatttgctgacttggttatacatatcaaatttatcaagtgcagtttttaaaacatgcttgattggatataagaagtctctttcaatcttctgcgcatcttcaacactaacgttagtaaagaattttgctaattcaacttgacaatatttaaaaagatcatcatttgcacgactaaataagctagttaatgcagcattacgttgatcactttcacctgaaaaagtagattcaaagcttaaataccataaacgacgcataatttcaggctttagagaaaattgtgatttaatagagctttcttgtctattcatcgtgaaaatgaatgctggtgagggatgagttaaattacgattgttagtaacttccttgatgaatctttcaaagtaagtacgggttgtaagctcgggactgacatcatcaatcattaatggacttacaggaccatttgtatatacatagtcacttagcgtgttggtaattgtcatattgatattactcttgccaagggcataattctttggatccatcattccactatctaagaaattatgagcaccaattaatttagcggctagtcttttccctagggtggacttaccagttcgaccttgtccgattagtgctgtagcaataggcacgtcttctctagatacattgcttccagataattcatataaattgcggattttccaaagccatggtgattcatatagaaacagcataaagtcacaagcttgccagccttcaccaacttctttgtaagtattatattcatgagtgatatcacagaaaagttgaagcgcattttttaattgcccttcagttaaatcagaagtaataacttcagaagggatgttatcaccaattttagaggcttggaataattgaccattattgtaaaactgaacaggaacagggaagagatcttcttctttttcaatttgtgatgtatctgcttttgcctttttgtcttgacgaataatgtgctgagtcaagctatataaatcttgcccgattgtatctagcttacgtcttttattgccaccttcaccaaataaagtaactgtttgagaagcaacgagtttttcattttcagataatttctttaattcatcatctttgctgtagtggtcgcgatacttttttatctcttcagctgggagaataattatgtctttaccagttgaattaggactgtttttgatttcaagagaagaatcttgcattacatgaatgcgaagatcgtctttatttttgtcttctaaataaccagatagttttttagcattaatataagttgtagcctgattaaggttatcttgaaacatttgttgatagcaattgaataatggatcagaagtattgccgtaatcccaaactaattgttccatatttttattaacagccgtatcggtaagattcattgaacctgaaaaggcagagtacttgctttgattttccattaaataaagcttagtgtgaatcaaattctgtttggtgaaaaaaagctgtaaactaccatctaaaatacgtttagtgaagggactatcttggtgttcgtagctatattcaatcaaatcacgacgtttatttaaaatttggtcaattcttttgccaattgaatttgatccattatcggttagtccaagaattagtgtgatctggtcaaaacgtggtataagattttgctcaataaatttaatattagaaacaaaggaaacgcctttaaactcagagaatttatttgactctctttgaaaatcaactaattgccaaaaatcggcattggaaattagtttttgatcagtatgatttagtatttctaatcccatataaaatcctttcgtgagtatacaaacatttgcttttagtgtatcgtgaaaaattggattagagcaaggaaaagttaatttattattgaatttatgaattagattaagtaaaatctgattcaaataacggaagtaaaaatataataatatgttatcggaaactgtcaaatcttttgtgtaaatagttctttctcgcaaattgattttttaattatttattcaaaataagattctaaggtatcctgaacctgaccaaagcctttatgaattcggttgaaatagcggtcattgtagctcattgcctggatgccaataaatgcatcaagcgactgttcagttggaaattctgccttaggcttagctttacgcttgatgacgttgttaaaggattcaatcatattggttgaataaattgaagctctgatttgtttgggataattgtagaagaccagcagatcgggctcaatttccttcaaacctttgatgacattgctataagctttattccatctggcatagaatttgtgcaagacagctgcagcttcttttttgcttgtctgttgatgtatctgcttgaattcgttcatgatcttttcgcggtcatccacccggactttagcacagatattgcgcatgacatgaaccaagcagcgttgaaaatgagctttaggataagtcctggccaaggctgttttcatgccaacaacaccatcagaaagaaagagttcaacttgcttcaagcctcgggatttcatgttttgaagcatatctgtccagacttcaatgttctcgctaggtgcaatgcagtagtcaatgacctccttgtgcccattaggcttgatgccaatggcaatatagactgcttcacgctcaaatgtttctcggcgcaaaggaaggtatgtcgcatccaaatagacgcagaaaaacttgtcgcttagcttgcgtttgtggtaagcctcaacctttggaatcatctgcttggaaatatttgatacctgagctggactgtaatggctgccatacatcttttcaattagatcggctatttccctggtggtcacgcccttggagtagagcttgataatcgtgctttccaaaacatcagagtgctgcttgtagtcaggcagcgtgtgctgatgaaattgaccgttgcgatcccgaggcacttgcacttcaattgggccaaattgcgtatcaactttgcggaaataagcaccatttctagagttgccagtattccagccatttctggcatagggatcatagcccagaaaggcagtcaattcagcttctaacaagttattaacagcctgttgtagctctttgcgcaataaatcatttattttgtctggattgaatagagcttgagcaaaatctttggtaaaatcattcatgaaggagttcttctttctgtatgtgtttttttgttcaaaccaatcatacgagaaaggaactcctttttctaatgtttaaagaaataaatttaaggaatcattcatccttacacaaactattttacagtctctgttatcgctttggagaaaattatgacaacagtatattttgtaagacatgctcaacctgatttatcagttcatgatgatttaacacgtcctttgacagaaaaggggttgcaagatagaaaaaaagtaactgattactttagagataaacacatcgaccaagctttttctagtccattcaagcgtgcaattgatacaattcaaccagttatagacgagaagaaactaacattatcatctatttctgactttagagaaagaaaaattggtgatgagtggatttctaattttcatgaatattgtgaaagacagtgggaagattttgattataagctaagaaatggcgagtctttaaaagagacgcagaagagaaatgttgctgctttgaagctagttttgtccaaatatcaagatcaaactatgattattggtggacatggtacagcaattggatcagtaattaattactatgatccaagctttaaatatgaagcctttgctatgatccagccaaagaatccatttattgtgaaaatgaactttgatggagaaaaatatttggagtataaagtagttactttttagtaaaaagataatctcataaagtaaaaatggtaaatcaaggtactaataaccagatttaccatttttttatttgttatattatagcttatgttaaattttatcctgagcaatgaaattatcataaatggttttgataactacttcttcatcttgccgtctggtaccaatcataattgagatttgggatgcaccctggttaatcatttgaatggagatgttctttttaccaagagggtaaagcaagctagcacataaagtcagcttgtccttcatcccttcacctaccaccattgtgattgcataatcatcaatccactgcatttgatcaggatttagactagtttgaatttcattacagataacatcaattaattgatcagttaagacatcttttttgaaaataatggtaatatcatcaattccagatggcatatgttcatatgaaacatgatgtttttgcaaaatttccattaacttcaaggtgaaaccagcacctttatttaacatatattttcttaaataaagggccgcgaagtttttgcctccggcaatacctgtgattgtgtgtttaggtataaagccgtcctctggtacgatcattgtcccaggtttttctggagcattagtatttttaacattgacaggaatttcgccttgaatagcaggaattaaggcttcatcgtgaaagacggaaaatcccgcataagatagttcccgcatttcttgataagtcattcttttaattggcttgggctgatcaacgatatggggattggctgaaaaaatagcatcgacatcggtgaagttttcataaagatcagcgtttaaccccctagctagaatagcaccggtaatgtcagaaccaccgcgagagaaagtagcaatatgtcctgatggtgtaatgccatagaagccaggaaaaatgatcttttcatcttttgcagccttaattctttttaagttcacataagtttcaggattgacttcagcattattagaagtgccagtgacaattaaacctacatcttttggctctaaaaatcgtgctttaattccttgatgatttaaaattttagcaatcaaaattgcattaagacgttctccgtgtgctttaaaggttgccatgcggtagtcattattagggtaacttagcttcggcaatgtaagtagaagctggttaatatcctctaattctgcttcaggcagctcaaaatattgggcaattaattcataacgcttaaaaatacgggtagcgatgtcttgataattattactcctcaagctcatatatgcgtaagtgatcattagatcggttactttaatatcatcctcagttcttttgcccggtgctgagactacaacgacttgtctttcgggatcggcattaataatacttagggccttatctacgctattacctgaggctagggaagaacctccaaatttaacaactttcatatctatttttccttaattattatttcaaatctaaaattgaactgatttctttttccatatcatttggttcaataattttttcggtcttgggttcacgatcaaaaagggcacgcacaccgattgataattgaccgcctaattcatcatgcaattctttaattgcaccgacgccagtttgcatactaggaccaccagtgatggcttcatacaccgtttctgggaacttatatggactggctgttgaaacaatgaccattggggtttgatcgccggtcttcttttgatattgatttgctacaaaagagccaacagcagtatgtggatcaattacatagcggtcataattgtagacccgtttgatttctgatttaacctcttcttctgttgcaaaaccagctgcaaaatttttttgtaatttagtgaaaacttcaccgctaacttgataatgaccgcgttgagtcaattgattcattaaactagcgacttcatagttattttcgccataaaggtcaaataaaagtcgttccaaattgctggaaactaggatatccattgctggtgcattggttaaatggaacttacgtcgcttatcgtagacaccattattaaagaaatcagtcaatacattgttttcattagatgcacaaatcaactttttaataggcaaacctaatttcttagcataatatccagctaggatgtcaccaaagttacctgttggcacagcaaagttaacttcgtctcctagtttaatttcttgtctgcgtactaattgtccataggtgtagaggtagtaagaaatttgcggaaccagacgaccaatattcatcgaattagctgaagaaaattgatagccattagcattaagtcggtttttgaaagaatcattgttgaagatttttttaacttcagtttgagcatcgtcaaagttacctttgattgcaattgcacgcaaattgttgccgcgttggctgagcatttgcttaagttgaacaggactaacgccaccttcaggataaaagactatgacatcggtacccttttgattagcaaagccacgcattgatgccgtaccagtatcgccagaagtagcggttaaaataataatatctttatcaatcttttcaatttgaacagctctggtcattaattgtggcaacatttgcaaagctatatctttgaaggcaagggtaggaccgtgaaaaagctccatgtaaaaatggttatcgtgcttttcgattggaacaatgctgcgatcatcccattgttcactataagcgctttgaactgcagtggtgatttgctccttagtaaagtcatcaaagaataagctaataaccatggcagcgatttgcttgtaggaaagtttggataaatcttctaacttaaaattagcttgaggaaaggcaacaggcacgtaaagcccaccgtcttgagccaagccttgaataattgcttgaggtgcagttaaagtgttttcttttgaacctctagtactacgatattgcataaacaatcttcctatcttatgaaatattaatattataactattgtaccttgattagcacctatgatacaatcgtaaaaataagaaaatcattaaaaagaggataagatcaaatggccatcaaaattgcattgcttggattaggaacagttggttcaggtgttttaaaaataattaaaaataataaaaagaagattagacaaacaagtggtgaagaaatcatcattgaaaaagctctagtacgtaatccagaaaaacatcgtaatttagctaacgaagtgatgctaactacagatttcgattcgattttgcaagatcccgaaattaaaattatagttgaattaataggtgggcttcatcctgctaaggaatatattactgcagcaatcaatgctggaaaaaatgtagttacggccaataaagacttaatggcaacttttggttcagaattgattaatttagctgcaagtaaaaagtgtgatttaatgtatgatgctagcgttgcaggtgggatccctattttgcggaccttggctacctcttattccagtgacattatttccgaaattcaaggaattattaatggtacgacgaattatattttgtcacaaatgggggaaaagggactaagctacgaggaagcgctgaaaaatgctcaagagctgggctttgcggaggctgatcccactaacgatgttacaggtaaggatgcagcatacaagattgtaattttaagcaagtttgcttttggtactaagattagtattgatgattttactattcaagggattaataatctaaaggattttgacattaaacaggctcagaagttaggctatgtcattaagctgattgggattgccaaaaatattaatggtaaattatttgtagaagttgctccatgtttgttgccagaaaatgcgattatggcgcatattaaaaatgaactaaatgctttacaaattaagagccaaagcctaggaacagcagtattcacaggcccaggtgcgggtagctctgcaacggctaattcagtcatgagtgatgtgattactgaaataaaaaacgtagtgaaaaagaccaccggtcagccatttagtaatttctcccatgttatgcaattaacaagttcggaggatgtgaagtattcctattatttatctttcgaagcagaagagaccttgtttgatttgagtaaattactctctgatttggaaattccggttcgtgagattaaacaagtacaatcaagaattgtagttgtaaccgaaaatattagtcgacagcagctacaagatttagcgattcaagatcaatatttaaaagctagctataagattttgcagtaaaggaagggaaaaaatgattattaaagcaccagcttcaacggcaaacttgggtcctggctttgattcacttggcatggctgtttcactttatttggaagtagaagttttaagcttagccgatcgctttcaggtggatcatgtgatgaaaggaattccacatgatgaaaaaaatttaattgttaagactgcactaacagtttatccagggttaccaccgcttcatttacgcgttaaaagcaatatcccattggctcatggtttaggtagcagttcaagtgctatcgcagccggaattgaattggctaatcaaattggtaagctgggactatcagatgaagaaaaggttcaattaggagctaaaatcgagggacatcctgataatattgcaccgactattttgggcggcttggttgttggtgctgaagttaaccatcattttgatgcagttgaagcaccacttcctccatatgcgttggtggcttatgtacccgattataatttggaaactaagacagctagagcagttttgcctaaagaattagcttttggcgtagctacgcatggctcagcagttgctaatactttaattgctagtttgtttgctcaagactaccctaaagcaggagaattaatggaacaagatgtattccatgaagtttaccgagaaaaactagtgccagaacttgtaaaagtgcgggaggtagctcattcaaaacatgccttggcaacttatttgagcggcgcaggttcaacgattatgacgtggattgaagataaacatgtagctggatttttgtcgggcttacgtaaacatgatttaaaagatgagacattaatcttacatcctgatgaacacggtgttcaaattatccaataaaaagactgaccaagcggtcagttttttagtcgtcaaaggttgcagcaaaactatcaccatcgattagcattcttttagcattgacagcataccaataaggaataacttcagtgccattttcttgctctaattcacagtcggccatttttaaaatttggtctaaatttttagcactgatgttagggtagagcttcagtaaagcttcttgagtaatgccactttgtttaaagccactagtgggataattggcagaaaaaatatcagaaaaatcatctaagtcatatctaggcttaaattctccatcaaagtatttgatttcgatgttttcaatttccataaaggcaccaagttgttttgccatgtaagggaacttattagctagttgttcaacagtaaaaccattgtttgctttagttcgtgcattgggatccagtttaaaccaagcttcacgtatattatgactatcttttctttcaataagaaggtctttgactttttgaatagctgcattgtgtctgtttacggctttttgccagtctaatcgattaggatataactgtctatagcggacagacaagggatgatcgattgcgttgtagataaaattcagcttgtcagtggtataagaagttagttcatcgtcacgccacattaattcatagtaagaactcatgaaagacacctttctatttggatagactaattaatattaactgaatagtatcattttttgctccgattaacaaaagtgataaaaatgtctatttagattggtcagcagcaaaacttttgttaaaattaatgtgtttactattagtatttgctcaaaggatttgacaaactatggatcaacttgataagttcaaccgacgctacaattttctttcaaaattgtcagctgccttcttttattcaattgcggttgcagttgccttgaactttttttggacgccggggcatatgtactcgtcaggaatcacgggttttgcgcaattaattaatactgtaagtgaaagatatctaccgtttacattatcaacatcaatgatgtactttcttttgaactttcctttatttatattggcttggttcaagataggacataaatttactttcttcaccatcgttgctgttgttctaggttctatcatgatgcacgctattcaaccttggcagatgcacctggacccactggtttgtgcgatttttggtgcttcgatcaacggtattggaactgggatggcattaaagaacggtatttcaactggtggactcgacattattggtattgtaattaggcaaaaaacgggcattagttacggaaaatttaatatttttattaatttgattattatcgctgctgcgggatacatgtttggttggccacgtgctctttattccgccttgactatttttattaatgggcgagtaattgatgcggtttatacccaacaccagaagatgcaagtaatgattgttactcagcacccacagcatattatcgatggtattcaaaaccggatgcatagaggaattaccattttgcatgatgctgaaggtgcatacagtcatattgaaaagacagttttgattaccattattgatcgatatgatatgtatgatattcgccaaatcgtgcaaggagcagatccgtatgctttcatgagtgttagtgaagttgaaaaagtatatggtcgcttcaaggagcaagaaatcgtttaatggatagcccttaaaccttgatatataaggatttataaatgaaatttgaatcctaggggcactttgggagcaaaactattcaaaaagaagcagaaatgcttcttttttatttggagtggctttttgtaattatggctttattattggtctttgttaaaagtgattaaaaatgatattatttcgattgagggatgttgatatatcgtggatcatttagtgtattctccacgagtgtggaggtgatcctatcatcttgaagggcacgggagacaaggcagagtattctccacacatgtggaggtgatcctactgttaacggtgatgactggtatccagttagcgtattctccacgtgtgtggaggtgatcctactttgagctgtgtcaacgccacagccgtttagtattctccacacatgtggaggtgatccaagtcgttacatcagccaaaagatgaggcttaagtattctccacacatgtggaggctaaatagctgctctgaaaaatatgttctatagagtgactgtttttgtatattatttaaaaatattgttgatggtgcacggagattgcgttcacttatatagtgaaaagatgctaagaaatctaaaatagaatcgagatgaattggtaatctggtaatcgtaagaaggacttagctactaatcgttgtattcaattttgataacaaattaattaaagagcaaaaaatatgaagaattataaatttaataagtttgtcattaagttaggctattgattttggtgaaaaaacaattaaagcatcatttggctttagacggccagattgatgccctttttggcatatttttctaaatatcattcgcgttacacgtaaaagcgtgtgttgtatatagtgaaaggaggctaagagaatcggagctaagaggtgacaaatatgccgaaagcctataaaattaactcatactggcaaaaatactaaatggtcattaaagttctatcctaaaagagctttgttaactggtgttttgattgtgattgctatagcattatggaaagtgatttttaatggctaaatatacagaagtaaataaaaagtggaatgataaaaatgaggcccgtaagctttacattaataagaggtcaacgacgaaaaactttattttaaatcttgctatcgaagatgatttagaacagattgaaaaggatattgaagaaagacgcaataatttgtaaagaaataaaatgggatacatcaggtaataaaaagtgcatctcatttttatttgtatataatactagttaacttaaaaaagcaataaaattcaaataaaatggaggtatttcaaagaatgacagagaataataaacaagccaaaaccactgataccaaggcaaaacccaacaacgacacagcaatcttcgctggcggttgtttttggtgcatggtcgaacctttcgatacagttgacggagtagaaaaagtagtttctggttatactggtggtcatgttgctaatccaacatatgagcaagtctgttcaggtacgactggccatactgaagctgttgagattacctttgatccagcaaaaatatcgtatgatcaattgctaaactattattggcaagtgactgatcccacagatgcaatggggcaattccaagatcgtggtgataattatcgacctgtaattttttataattcacctgctcaaaaagaagcagctgaaaaatctaagcaaagattacaagctagtggtaaatttgataaaccaatcgtaactaaaattgaaccagctaagccattttatccagctgaggaatatcaccaagatttttataaaaaagatccacttagatatgcaatggaagaagctggtggaagagctaagtttatcaaggaacattgggattaataaaaagcagatcataactgttataagctgtgacctgcttttttactttcaatattttagattatgttaactatttctttaagttgcttttgataacctcgattggattgagccaagttccgttgttaacgttccaattcttacatggaaaaccatatttgtttatgtaatctttatttgtttgagtaacgccaaggtgtaagtgtgagccagttagcttaccgatcttttgatctaatttaatcttttgaccagtcttaacataaatgtcttttttcttattaaacccttcttggtaaacttcaacgtaattatcaggactaataacccagatgaaccagccaaggccgttgccataagcaacctttttaacagtaccttgatgaattgcatatacgttagaatgcccaacttctgaaaaaccaaaatcccaaccatcatgaaagtaggaaggtggtgtagtagaacgcatatagttagttatgccaaaagtttgtgcattatacattggacgaacaccatttttcttgttggctttaaacggataagcccacttgaggttcttgggttgaacttcagttgtattttgtgagtcatcaagcgtatcagcagaagcagtggtggttgataaaccaacgcttgaagttaataatgcagtacctaacaaagaaattattaatttacgaaatttcattataaaaagaaaccagataagttctgatttttatctcctctcttaattcacctaaactattgtagctcagcagttttacgagaaagttacaattaaatttcgattaataacaaaaagttagtatgagtatatgtgaatatgtttttaattacgagtctaggtatttttgaaatttctttactttattttgggatttacatagaattaaattaataacgtttacattgaatttagtaaatgatagtagacattaatttggctcaaaaataataatttggacgaaactgtcaaatcttttgtgtaaatagatctttctcgtaaattgattttttaattatttatttaatcaaagtaggattctaaggtgtcctgaacctgaccaaagcctttatgaattcgattgaaataacggtcattgtagctcattgcctgaatgccaataaaagcatcaagcgactgttcagttggaaactctgccttaggcttagctttgcgcttgatcacattgttaaatgattcaatcatgttagtcgaataaattgaagctctgatctgcttgggatagttataaaagaccagcagatctggttctatgtctttcaagcttctgataacatggctgtaaaccttgccccatttggtatagaagtcatgcaggacagctgtggcttcttctttgtttgtctgttgatgcacctgtttgaattcgttcatgatcttttcacgatcgtcgacgcgtactttagcgcagatattgcgcatgacatgaaccaaacagcgttgaaaatgagctttaggataagtcctggccaaggctgttttcatgccaacaacaccatcagaaagaaaaagctcaacttgctttaagcctcgggatttcatgttttgaagcatatctgtccagacttcaatgttctcgctaggtgcaatgcagtagtcaatgacctccttgtgcccattaggcttgatgccaatggcaatatatactgcttcacgctcaaatgtttctcggcgcaaaggaaggtatgtcgcatccaaatagacgcagaaaaacttgtcgcttagcttgcgcttgtgataagcctcaatcttggggagcatctgcttggaaatatttgatacttgagctggactataatgactgccatacattttctcaatcaagtcagcgatttctctggtagttacgcctttggagtatagcttgataatcgtgctttccaaaacatcagagtgctgcttgtagtcaggcagcgtgtgctgatgaaattgaccgttgcgatcccgaggcacttgcacttcaattgggccaaattgcgtatcaactttgcggaaataagcaccatttctagagttgccagtattccagccatttctggcatagggatcatagcccagaaaggcagtcaattcagcttctaacaagttattaacagcctgttgtagctctttgcgcaataaatcatttattttgtctggattgaatagagcttgagcaaaatctttggtaaaatcattcatgaaggagttcttctttctgtatgtgttttttgttcaaaccaatcatacgagaaaggaactcctttttctaatgtttaaagaaataaatttaaggaatcattcatccttacacaaactattttacagtctcatttggacaatgaaagtagagaataataatgacgaagttaaataatgaatatatggttggtctagatattggtactaattcatgtgggtgggttgctactgattttgataataatatattaaaaatgcatggaaaaagagcacttggctcgcacttgtttgatgaaggcgtatcagctgctgatagacgagcttttagaactactaggaggcgtataaagcgaagaaaatggcgtcttaaattgttggaagaaatttttgatgaagaaatggcaaaggtagatccaaatttctttgctcgtttaaaagagtcaggactttctccattggacacaaggaaaaatgtgtcttcaattgtctttccaactaaaaaaatggataaacaattttataaaaaatttccaactatttatcatttaagaaacgctttaatgaaacaggataagaagtttgatcttcgggctatttatattgccattcatcatatcgtgaaatatcgaggaaattttttgtctaattcatccataagtaattttagtgcgtcaaagattgaaatcgataggtttgtaaatgaactaaacgatctttattccatatttctgccagaaagtggagtgatttttgatgcaggaaatgcttcaaaagttgaagacattattcgaaatgaacaaatgtttaaactggataagataaaagaaattgctgatgtgttacccgacactgaaaataagtctggtctaaaactaagtaaaaaaatttcaaaagaaattagcaaagcaattttaggatacaaagcaaaatttgaaattattttacaagtaaatgtagacaagactgacagctcaatttggaattttaaattaaatgatgaaaatgcggatgtaaatttgagtgaaattacttctgatttaactgatactcagttacagatattggatttagttagaaacttatttagtgcaatttctctactgaatattgtcgatgaaggttcaactttatcggaatctatgataagaaaatataacgatcatgcccaagatttgaaattgctaaaaacagtaatcaagaaccattcagacaggaaaaaagctcacaatttacagttggcttacgacaaatatgtcaataaccgtcattttgttgatgttgaaactaaaaaagcctttcccaacaagcacctttatcgaaaaagcgatttttatgaaatagttaaaaagaatttggatgcatcaaaagaggcagttcaaattagaaaagaaatagcgttagataagtttatgcctaagcaacgaagcgatgaaaacggcgtaattcccttccagcttaatcaaatcgagctagataagataattgaaaatcagggaaaatattatccatttttaaaagagattaatccaattaaagctcatcgtatgcaggcaccttataagcttgatgaactgattcgttttagggtgccatactatgttggtccaatgattgaaccaacaaattcatcttatcctcaaactcgacaaaatcaatcttttgcttggatggttagaaaagctaaaggtcgaattacgccttggaattttgatgaaaaagttgatagacaaaagtctgcaaataactttattaaacgacttacaacaaaagatacttatttgtttggtgaagatgttcttccagcaaatagtcttttatatcaaaaatatactgttttggatgaattaaataaaattagtgtgaatgggaagaaattatctgttagcgtaaagcaagaactttatgaggacttattcaaaaagaataatactgtctcagctaagcagcttaaaaattggttaatagaaaatcagaaattgccttatatcaaaattaaggggttagctgatcaaactaaatttaattctagtttatctacatacattaaattaaaaaagtcaggtttatttgttgataaacttgactcaaatgaatttcgtgatgattttgaaaaaattattgaatggtcaactatttttgaagataagcagatttatatacaaaagcttcaaacaattgattggcttacagcaaaacaaattcaattcctacaaaatattagacttcagggttggggcagattatctaaaaaattgttaactgctattgtagattcaaatggtcaaaatattattgagcagttgtggaatagccaacaaattttcatgagtatagtaaataaagcagatataaaaggcacaattacagatgcaaatcaagatctcatgcattcaaatagtatggaagatattttatcagaagcgtatacttctcctgcaaataagaaaatgattaggcaggttgtaaaagttgttcatgacattcaaaaagctgcttctggtcaagcacctaaacaaatagctattgaatttgcacgtgaaagtagaagaaattctaagttatcacaaacacgagggcataagctacaggatatttaccaaaaaatatcaggagatatagtaaataaaaatttgaaggataagctggctgaatatatcaagaataatcaattaagtgtctgggaaaaaactagcttccagatgaataaaaacgatcaagatttccttttttaagaatcttgatcgtttttttgttctctttaaaatttttaacaataaaaatcggcccttcagccaccttctttgacaatatttgttcaaattcatcatcataaaggcaattccgatatcggtttcgaccttctctttacctcgcaggtgcgttctgcgcatgccaaatacgttcttcaaatgtccgaaaactggctctacatcatattttctcatgccatagatgtgtctgccttcttcgctttggagaacttcttttgctttttcttttaaatattgccagttaggattatagcgaacttggcgctggcggccgctagctgttttagccaattgttccaattctggcgttagctggaactcgtctgcctcataaaccttaaaatcacggacctgaccagtagaacgatccttgcgctggctgtaatatttgaaattgaatctgacgccatgatgatcaatgtaataatcatctttttcattgtagtaccagttgattagcttagttggatcattcttatactttttggtctgttctttttcatacatagtgtagggaataaagtacttcttgtctggatatttttcctccagcatcgaataattgtattcactgccatagccagcatcggcgacgattttgtcaaacttgtccaacacggtcatttgatccaaaaccggctccaaagttttgaaatctgtcggattaggaaagatggcataatcaactacatattgatcggtcgtgactgcttgaatattgtagccaggctttaattgaccatttttcatgtggtcttccttcatatgcataaaggtggcgtcatgatctgttttggaataactgttgcgtccggcaaagatctcttcggcttcttcatatttttgcattcttggcacataatcttttcttagccggtgcagaatcttttttagtccacgtcgcttggcttttcgaggtgaaccgccaggaatggctttgttttcctgctcaatctctttagtcagcttgttaatttctgcttcagtttcttgagctaattcctttagcccctgactagtttgaactttttctttttccatttctttgactacttctttagtaatcaattcatcataaagttcaactgcctggcctttcagcttttcatgatacttttcaaccgctttgcgccagacaaatgtatagcggttagcatcagcttcaatcttagtaccatcgataaaagcagcaccttcattgattaagccttcatcttctaacaggttagtgaagtagataaagctctttttaatcagttcattggcatggctgcttgatctaaaattattgatagtatgatatgaaatcttttgctggtcagccaagatcatcattggcagattttcttccagcatcaactcaatctttctgccagaaaaaactcttctggagtaagcaaaaagcagtattttgagcatcatggctggatgataggctgggcggcccgttttagcagtcttgcctactaaaacatcttctggaattgaatctacaaaccagctgatgacattagccaaatgattggccggaatggcaaaatctagattaagtgttaaagcagtttgacctgtgatataattcttgtacatgttagtttccaccttttttattttgtgatgatttaataatatcaaggctggagctaaaagtatacaaaaagagcgttgaaacaaaaattcaacgttcttttttcatgatctgagacttagttttttcccagacacttcatgcaacttggaagagatgcttatactggtaagccaattaatattgatgaagtatctcagtattatgacatagaccatatcttgcctcaaagttttattaaagatgattccctgaataatcgtgtgttggttgctaaaccaataaacaatggtaagtcagatggagttcctttaaaactctttggtgataatctagctactggtttagggataacggttaagcagatgtggaataactgggctgataaaggactgattaataaagcaaaacaaaataatttattcctagatccagagaatattaataaacatcaagcttcaggttttattcgtaaacaattagttgagacaagtcaaatcataaaattagcaactacaattcttcaagctgagtatccaaagactaaaataatagttgtcaaggctagttctaatcactatttacgtaatgagtttgatttgtataaaagtcgagaggttaatgattatcaccatgcaattgatgcatatttaactactatttgtgggaatctactgtatcaagcgtatcctaaattacggccattctttgtttatggtcaatttaaaaagtttagttctgatcctaaaaaaagaaaatgaaattttaaaaaagaccaaaaattttgactttgttgccaaacttttgggtagtaaagcaccaaatgagatcagatctcaacaggggaaagttttatttgaaaagaataaaattcgattgcaacttaataaggcatataattacaaatatatgcttgtatctagagatacgacaacaaagaatcaagagatgtttggaatgactatatatcctcgggctgaacgggatatagcgaagagtcgtaaattaattgaaaaacgtaaaggattttcaacagatatttatggtggctatactggtactgcagcagcctatatggcaattgtaagaattaataagactaaatcttcacagtacaaagtaattgctgtacctatgacgaagcgtgctattttaaataaagctgaaaaagaaggtaactatgaaaagattctaaagcaaattttatcaccaagtattttatacaacgataagggaaaacgaaaagcaggagtaatatcatttgatattattaaaggtaaagttccatataaccaggttgtgcaagatggcaataaaaaatttttgttaaagagtgctatttatttatgtaatgcaaaacagttggttttatcagaagaggcaatgagagtaattactggtcattggctagattctgataagcaagatcaagaacttttggatgtttacgatgaaattttagaaaagattgatagatatttacctttgtttgacattagagattttagaaataaattacataagggtagagaaaaattcttgaaattaaacgctgaggataagtttaaagctattattcaaattttgaagggtttgcatgataattctgatacaggtgaacttaaagatattggtataactgtaccatttggtcaacttcaaaataattctggaattacattatcttcggacactattttagtttatcaatcacctactggtttgtttgaaaaacgcgttaagatttctagtttataaaaataaatgaggaaccgacatgtggttcctcatttttacataaaaaaagtccctcgatagctcgggacaagtgttgaaactctgcgtactaaaacgcattgcttgattttaaattatgattgttagatcaataaggttaagagttgggagctacccaacaaataaataatatcattatagatatagatgtacaaggagaaaaaatgggatggcgtaacgtaataataactcagcatgcaaagctaacatactctatgaatatgcttatagtccaaacaaaagatggtattaatcaaatacctattgaagatatcaatttggttttaatttcaacatcacaggctgtgattactagtgctttgataagtaagttagccaaaaatcaatgcaaggtaatctttgttgatgataaatatcaacctgttacagagacagtgaattattatcctggggctagggacataaagaagttgaaaatgcaatttgaatggaatgaaagaagaaaagaaaatttatggaccaaaattgtagctgctaagctaaaaaatcaaatatcggtgttaaaaaattatcgaattgatgaaactgaagttgagcaagagctgtacaagttagaggtgaacgatttatccaatagagaagcagcggctgctagaaaatatttcatgaagttatttggtaaggactttattagaagaaattccggagtgattaatgcagcactagattatggatactcaatattgctttcatccttcgatagagaaattgcaatgaatggatatttgacttatctgggaatacatcatcattcagtggaaaatcaatttaatttagcttgtgatttaatggaaccatttagatccatagttgattattgggttaaggcacacgaaaatattaccagttttacaccagatattaagtatggattagttgagttgcttagcttacaaataaaattcaatggtaggaatacaattttaacgaatgcaatttctgtatatgtaagaagctgccttagatatttaagtggagaaacagatgatattagaatagagatgagtttgtgtaatgaggtaccgaatgatgcgattaatgataatgtttgatttgcctacggacactgccgctgaaagaaaagaatatcgacaatttagaaaagctctaataaatgaaggatttttaatgattcagttttcggtgtatgaaagagtatgtgtcactagacaaacagctaattttttagaaaagagaataagaaaatttatgcctagcaaaggtgttgtgcaaagtctaatggttacggaaaaacagtacagtgatatgcatttcttggttggggatgcagtaaaagatattcgcaatacttcagacaggacagtgatactatgattgtttcctatttgtcacataagaaaatctgtttaaaagatggaattaatgttatttgcactcaaagtcccattgcctataaagatctggttttaggttttcaagccttaaatgatctaatagtatgttctgatgacgaatacaacaataagtctattagtaagagttttgattttgtaggagccccgttgttaaatgacaatattatggcaaagtatatgaatgtcattattaagaactttatttctaacttggatgaggtaaacagaaatagaattttaaaatctttttattcattagaaacagtattgaatgattctttgcttttggaagatttacctttagaaattgattttagcgaagatattaaaaagctgttgaaaatggttaacattcatttagatgctcaattaatgttaacgagactgtaaaatagtttgtgtaaggatgaataattccttaaatttatttctttaaacattagaaaaaggagttcctttctcgtatgattggtttgaacaaaaaaacacatacagaaagaagaactccttcatgaatgattttaccaaaaatatagcacaagctctattcaatccagacaaaataaacgatttattgcgcaaagagctacaacaggctgttaataacttgctagaagctgaattgactgcctttctgggctatgatccctatgccagaaatggctggaatactggcaattctagaaatggtgcttatttccgcaaggttgatacccagtttggaccaattgaagtgcaagtgcctcgagatcgcaacggccagtttcatcagcacacgctgcctgactacaagcagcactctgatgttttggaaagcacgattatcaagctctactccaaaggcgtaactaccagagaaatcgctgacttgattgagaaaatgtatggcagtcattatagtccagcccaagtatcaaatatttccaagcagatgctccccaaggttgaggcttatcacaagcgcaagctaagcgacaagtttttctgtgtctatttggatgcgacataccttcctttgcgccgagaaacgtttgagcgtgaagcagtctatattgccattggcattaaacctaatggacataaagaagtcattgactactgcattgcgcctagtgagaacattgaagtctggacagagatgcttcaaaacatgaagtccagaggcttgaagcaagttgagctctttctttctgatggtgttgttggcatgaaagcggccttgaccaggacttatcctaaagctcattttcaacgctgcttggttcatgtcatgcgcaatatctgtgctaaagtccgggtggatgaccgcgaaaagatcatgaacgaattcaaacaggtgcatcaacagacaaacaaagaagaagccacagctgtcctgcatgacttctataccaaatggggcaaggtttacagccatgttatcagaagcttgaaagacatagaaccagatctgctggtcttttataactatcccaagcagatcagagcttcaatttattcgactaacatgattgaatcatttaacaatgtgatcaagcgcaaagctaagcctaaggcagagtttccaactgaacagtcgcttgatgcttttattggcattcaggcaatgagctacaatgaccgttatttcaatcgaattcataaatgctttggtcaggttcaggacaccttagaatcctactttgattaaataaataattaaaaaatcaatttacgagaaagatctatttacacaaaagatttgacagtttcatgttaacaccatatgctataattgaaacagttcttaagattcatcaagaatataatcttgatagtattcccgtgttttgtaatgtagctcattaccttgatgaaacacagttaaaagaacttagtaagattgttagacaacttaaattgaaaattattttaattgaattcacagataagaaatatggggtagcagtcaaggatgctcaagttgcatatattgatcgagatcttgttgattggtattagacaattgattaaaaagatattatgaaatatcggttttagatgattgttagatcaatgaggtttagatcagtagtctccaattcaaaaggtgcttacgtgttttagatgattgttagatcaatgaggtttagatcaagcacttgaatcttgtccctgctaggaacgttttagatgattgttagatcaatgaggtttagatctcgaatttagaaaaatcaacattaacgcgggttttagatgattgttagatcaatgaggtttagatcccgtgaaaacggcgtttacatgcgtaagacgttttagatggttgttagatcaatgaggtttagatctattagcttttgcggcggtaccaacgtacggttttagatcaatgaggtttagatcccactatcgcgcctggaatacctgttttctgttttagatgattgttagatcatgggagtcagaacagtaatatgcataaatttacaaatatttttctgtaaataaaaatcgctctagagaaactctagaacgatttttggacatacttgatcttagtatctattattacttagcgtaatcatcaatacccaagtgctccaaaataagtgcggcagtttcttcaatggagcggtgagcaacattaattacatagcaacctaatttcttataaagtgcttgtgctgattcaagctccttgttgattgaatccatattagaataagtagtatcaggattcaaaccataagcgatcattctttgacgtctgatttcgttcaatacagatggatcgttagtcaagccaataatcttcttaggatcaatttcgtagatttcttttggaatgtgagtttcaggaacaagtggtaaattagctacctttaagttcttattggctaagaacaaagaaagtggagtcttagaagttcttgataccccaagtaaaacaacgtcagcttccaagaaaccttttggatctttaccatcatcatacattacagcgaattccattgcggaaattctgtcaaagtacttttgatttaagctatgctgtgcaccaattttttgatctggtgtcatatgagtagtttgttgaattgcttcaactacaggtgagaagatgtcaacacattcaacattatgctcacgggcaaatttgataactggcatttgcatttcatctttaaccaaactgtagataattaccaagtttggatatttttcaatttctgttaaaacttcgtccaacttcttttggttagtgataaaggggtaacgacgatagttgatattgcagttaggaaattctgcagctgcagctgtggcgttactaaaagcagtgtcaccagccgcatcagaaataataataatgtttaattcattttggtcttttgtttctaccatattaagctcctcgtgtattattaaatatctttctgaaaataattatactattaatgaaagcggattaacaataaaaactcagctcttttattaaggtaaagtagtcggtttacttaacttaaaaatttatcaaaaagtttttgaattgtattgaccctaaagattagtttggtataatttaagtaaatgtatggcgtaacgccaagaaatggaaggagggatcacacatggctaagacaatcgttcacgaaaacgagtctattgatgatgctcttcgtcgtttcaagcgttccgtttcaagaagtggtaccttacaagaataccgcaagcgcgaattctacgaaaaacctagtgttcgtagaaagttgaagtctgaagctgcacgtaagcgtagacattattaataaactactgagaaagctacctgtttttgggtagcttttctttttgacttcttgaagcataattttgattatgttaagtaaatatttgttagttttattttagttaagaacatagtttgttataatactattgggtttttaatagaaagaaggatattaaatgagtttgtcagatcaaatcatggctgatatgaaatcagctatgaagaatcacgacaagacaactcttaatactgtccggatgatcaaatcggccttaatgaatgaaaaaattaaagcaggacacgatttaactccagatgaagaattaactgttcttaatcgtgaaaagaagcaaagagaagaatcgattgacgaatttattaaggctaatcgtgatgatttagctgaagaaaccaaaaaagaattagcagttgtagaaaagtacatgcctaagcaaatgaatcaggatgaacttagagcagctgttaaggaaacaattgatgaagttggtgctaaaggtaagtccgactttggtaaggtaatgaaagctttaatgccaaagattaagggacgtgccgatggcaaggctgcttcgcaatcagttcgtgatcagctaaattagtagtaacaagaaggagcgggtctatttggctcaaacaacttttacacctcaaagaccagaaaatattcaaaaactagttggagttaatgacggaaatttaaagcttctttctgaaggttatgatctttctgtgtcagatgtcggtaatgagattgtcattgcaggagacgatgaagagaagatcaagaaggtagttgctgttctaaaggcactcgatagtgttgtgaatactggtgttaacatcggtgcgcccgacacagtaagtgcgatgaagatggctgacaagggtaccacagagtactttgcagacctatataaaaaggttttgattagggatgctaaaggtagacctatcagagtcaagaatatgggacaaaagcgttatgtcgaagctattgataaatctgatgttgtctttggaataggaccagctggaacggggaaaacattcttagccgtagtttgtgcaattgccgcctttaagaagggagaagtttctcgaatcattttgactaggccagctgttgaagctggtgaatcacttggatttttacctggtgacttgaaagaaaaagttgatccatatttgagaccaatttatgactccttgtatgctattcttgggactaatacgactgaccgtttgatggaacgaggcgtaattgaagttgctccacttgcttatatgcgtggacgaactttagatgacgcttttgtaattcttgatgaagcccagaacactacagatgcccagatgaagatgtttttaactagacttggatttaattctaagatggtcgtaaacggtgatatgacacaggtcgatttacctggtcgacagcatagcgggttaattgatgctagacatatcttgaagaatatcgaccaaattaaatttatcaacttttctgctaatgatgttgttcgtcaccctgtagttgcgaaaattattactgcttatgaaaaagaggacattaaacactaaaaatggatccaattgatattacttataatgatgaagttggctttttagatgatgaaaagcgtaactggcaagactggattatgaaacttttgctgctagctaagaaggaaattggcaaagataacaacttagagatgagtattaactttgttgacgaagatcgtagtcatgaaattaatttaaagtatcgtgacaaagaccgtcctactgatgtaatttcctttgcaattgaagatggtgaggattcaattgatcttgcagcatttgcagatgatccagactttcaagaggatatcggtgatctatttatgtgtcctagtgtgattaagcgtcacagtaaagagtatggtacaggttttgatcgagaatttggatatacaatagtccatggctttttacatttaaacggctacgaccacattaagccggatgaggccaaagaaatgtttggtattcaaggaaaagtgttagaagattatggtttgccattgtatcctgatcaattagatgaaggcagaggtaaataatggaagaaaaagagtttaagtctggctttgttgctttagttggtcgtcccaatgttggaaaatcaactttaatgaactatttagttggtcaaaaagttgccattacgtctaataaaccacaaacgactcgtaatcgcatttcgggtatttatacttcagatgaaatgcaagttgtttttgtagatacgccaggtatttttaagcctcattcaaaacttgacgactatatggataaggctagtgtatctagtttgaatgacgttgatttagttttattcatggttgaacctgaggaaatgggtaagggcgatcaatacattgccaacttgttaaaagaagtaaaagttcctgttcttttagtaattaataaagttgatgaaattcatcctaataagcttttgccaattatggattcatatcacaaacttgagggctttaaagaaatactaccgatttctgctactcaaggaattgggattgaagatctgcttaaaacgattaaggaatatttgccagtaggcccacaatattatggtgctgatcagatcacagatcggcctgaatattttgtggtagccgagttaattcgtgaacaaattctgcgactgacttcacaagaagtaccacatgctactgctgtcgcagttgatcatatgaatactcatcaaaatggcaagctcttgattgaagcgactatctatgttgagaaagacggtcaaaaaggcattattattggtaagggcggtaagatgctcaagcagattgggattaattcacgtcaagagattgaaagattgcttggtgaaaaggtcaacttgcgtctctgggttaaggtccaacataactggcgttctgaccctaactttttaaagcgaataggctatgacaaaaaagaactttagttgaattactgttgtataagcgttgtcgaaagatgacgtcttttttgtatgtttagggagacaagaaaattctattcgttggataactaatgggataaaaatagatacaatagtaatgacaaagtgatgaaattttgggatctattgttttgtgattgttgttatattgggatttgtttactgtattctccacgtatgtggaggctgaaacccagtttcgaagttgattctgggtaaagtcttggtattctccacgtatgtggaggctgaaacagcagtctttttgtactatagactatttatgatattatgatatcttcatcagaatatctataaaaaatgaattttaaatactaaaggagtcatgatatggcacgtgaactaaaagaagttcagggtattatctttaaaaggcagaaatataaagaagcagatttattagccaaaattatgactaaacaagatgggattatgactctgattgttaaaggagccctgaggcctaaatcaagattaagtgcagcaacattaaatttttctattggtacttacgtaatttatacgagcgaaaagggcttaagtaatttacgcacatataaaggggcaaggcagtttgatggcttatataatgatttaaccaagaacgcttatatttcttttatttttgatttaattgatcacgcctttgtagaatatcagccaattggtaaatattatgatttagctttatttgctttgaaaaaaatagatagtggcgttgatgcagaaatgattacacaaattgtgcagatgaaaatattagcagcatatggtgttgagccacagctaaagcattgtgttatttgtggtaaggaaaaaggcgtttttgattattcgattaaaatgggtggagttatttgtagcgatcattttagtacagttactagccgaatgcatttaaagccaaaagaaactgctgtaattagaacaattggcttattaccgattgagcgattaggcgatattaaaattaatgaagaaacgaagagggctactagaaaagcgattgatcgtatttaccatgaaacgataggcctaaatttaaagactaagaaatttttagatgaattaaaactttttagttagtaaaaatctggttttaccatgacccatgtgttaaaataaaaacgtatttgacgatgatgaggatttaagaaaagtactagttcagcgaatgtcggtcggtgtgaggacatctaggaaaaggcacctctagtcatattgttcaattaagagcaggaaggatacttcctgaattagggtggaaccgcgataatatttcgtccctatgcaaaattttgcataggctttttttatggcctagcgcaggaggagattaaaggaaatggcagataagaaattaaatattcagaatatgatctttaagctggaacaattctggtcctccaaaggttgtatgattatgccttcatacgatgttgaaaagggtgcgggtacaatgagtccttacacttttcttcgtgcagttggtccagaaccatgggcagcttgttatgtagagccttctagaagacctgcagatggtcgttatggtgaaaaccctaatcggttattccaacaccaccaattccaagttgttattaagccagctcctaaggatattcaacaatattacctagacagtttgaaagttttaggtatcgatcctttggaacacgatattcgtttcgttgaagataactgggctaacccatctatgggttgtgctggtgttggttgggaagtatggcttgacggtatggaagttagccaattcacatacttccaagttgttggtgaattagatgttaagccaactatgagtgaaatcacttacggtgttgaacgccttgcgtcatatattcaggatgttaactcagtatttgatcttgaatggggtaatggcattctttatcgtgatatcttcaagcaaccagaatatgaacattctaaatatgcatttgaagaatcaaatcaagaacaattgcttcaattctttgatatttatgaagcaactgctaagcgtttattggataagaacttggttcacccagcatatgattacattttgaagtgttcacatacttttaacttgcttgatgctcgtggtgctgtttcagttactgaacgtgctggttatttatcaagaattagaaatcttgcgcatgaagttgctgtcaaatttgtcgaagaacgtgaaaaacgtggcttcccattgcttaaaagtgcagaagacaaaaaggcgggggtagaaaatggctaaagattatttatttgaaattggtactgaagaaatgccagctcacgttgtaccacgcagcgttaagcaattagctgacagaacaagaaaatttttaaaagaaaatggcttgaaatttaaagatattaagactttttcaactccacgtcgtttgactattttggttgaagatttggctgaaaagcaagacgatattgatgaagttaaaaaaggtccagctaagaagattgctcaagatcaagatggtaattggactaaggctgctcaaggatttgctcgtggccaaggaatgactacagacgatatctattttgaagaacttaagggtactgaatacgcttatgttcacgttcaaaaggaaggtaagaaagctagtgatatcttacttggtatgagcgatatcattaaggcgatgactttccctactaagatgcgttgggattcaaatgattttgagtttgttcgtccaattcactggcttgtttcattatttggcagtgatgtaattcccgttaagattttggatattactgcaggtcgtaaaactcaaggccatcgtttcttaggcgattcagttgttttggccaatgctgatgactatgaagatgcattaaaagatcaatttgtaattgctgatgcagatgaacgtaaagatatgatcgttcgtcaaatgaatgaattagttaagaagaacaactggcaagttaaaccagatcgtgatttactagaagaagttacttatttagtagaatatccgactgtatttgctggttcatttgatgaaaagtatttgaagattcctgatgaagtgctgattacttcaatgaaagacaatcaaagatactttgaagtctatgatgaaactggtaagttaattaatcactttattgctgttcgtaacggaaataaagattaccttgataatgttatttcaggtaatgaaaaagttttagttgctcgtttggacgatgctcaattcttctatgatgaagaccgcaagtatccacttagtcattttgttgatcgtcttaagaatgtttcattccacgataagattggttcaatggctgaaaagatgcaacgtgttcgcatgattggtgattacttagctaagcgttgggatttaccagagaatgtagtcaaggatttcgaccgtgctagtgaactttacaagtttgacttagttacccaaatggttggtgagtttgcagaacttcaaggtgtaatgggcatgcattatgctcgtcttgcaggtgaggacgaagaagtttcagttgcaatcaaggaacactacatgcctgccactgctgaaggtccacttcctgaaactacggttggttcattattatcaattgctgataaaattgatacaattgtaaccttctttggtgcaggaatgattcctacatcatctaatgacccatacgcacttcgtcgttatgcatatggtattgtaagaatcttacttaatgagaagtggtcattaccatttaacgaagttttaccagaaatcattagtatgcttaatggtgtaactccagctaagctacctaagagtgatgctgaccaggaaattgcagacttcattcgtgatcgtgtcaagcaatacttacaaaagaatgacttcaagtatgatattattgatgctgttcttgcttcaagtcaacaagatccaagtcaaattttagcagcagctactgtattgcaacttcaccatgatgatgaagaattcaagccagtagttgagagtttgactagaattgataacatcttaaagaaggctaaatttaagagtaatactgctgttgatgaaagtctctttgatgataacagtgaaaaagaactttacgctggcgttcaaaacttgcaagatattgaaagtttggctgatctctaccaaggttttgttcaactgcaaccagtgattgatcaatactttgaaactaatatgatcatggctaaggacgaaaaggtcaagaataaccgattagcacaattatatgcagttaatgaattagcagatcgtttaggtgacttaagcaagttagttattaagtagttaatttagatagaaaaagggtgattcatatggctggacggattcctgaagattttatttcagaggttcgcagtaacgtcaatattgttgatgttatcagtcagtacgtttcgcttgagaaaaaaggcaaagactatattggtctttgcccttttcatcaagaaaaaactccgtcgtttactgtaaatgctgataagcagttttttaagtgctttggttgtggtaagggtggaaatgtttttaaattcttgatgtataaggatgatttaacttttcccgaaagcgtcgagcgagtagctgagtttgcccatattgctatgcctaatggatatggtcataatagtggcaccaaattaaatccacttatgcaaatgcatcaggatgccgttgatttttatcatcgtgtgcttttgactactaaagccggtgaacgggggatgcagtatgctcaaaagcgagaactagatcaagaaatattagaccattttaagataggctatgcacctaaggctgataatgttttgattacttatttacgtagtaaaggttatcaagatgatgatctagcacaaagtggtttatttgttcaagctagggatgggcagttatacgaccgttttcgtgaccgtttgatgtttccattggataatgaaaatgggagaacgataggcttttctggtagacgaatttctgatgataagaccgaagctaagtatatgaatagtcctgaaacggggatttttaccaagtcaaaggtattattccactttgcagaagcaaagaaagcagctcgtggtgaaggtcacttagttctatatgaaggttatatggatgtaattgcagcatataaagcaggggtgaaatcgggaattgcctcaatgggaactagtttaactgatgaccaaatatatttgttgagacgtattactcctaatatcattattaattatgatggagatgatccaggagtccatgccgaagaacgtgctgcacgtatgtttaataaagatggcaattttaatttaggaattgtagttttaccagaaaaactagatcctgatgaatacgtcaaaaaatatggcgctgagaagtatctggaagaagtcaaaggtgccttaacgccgactgactttttcttaaaacggttggaacaaaaatataacttagataatgaccgtgaaaagattgcttatttaggtgaggccgtaaaagaaattgcacaagtgcgcaatccagttgagcaagatatgtatactgaaaaattggcgaagtctagtggggtttctattgcttcgttaaaggcaaatcttgctaaagaaagacggcgaaataatcgggcacgcaatcatgtacgtaattctcaaagaaattcacctgattatccgatagacgtacctttacctggtgatgaagacgtgcctacagagcagtcagtagttgaaaaaaatcctagtcagaccagactcttgtatttatttattcattcaactgatgctcaaaaatatatgttagaagggcaatttcattttcctaatcaggattttgaaactctggcacaggattggttaaaatatgcggaaactcatgaaaatccacaaattgatgggttcttagattttattcctgagcaacttcaaggtataatagtagatgctgaaatggcacagatgccaaaagattctacaattcaagaagttgatgctttggttctagcattaaaaagacgcaacatctattccaggctgaatgagcttcaagctcaattacaggatgctaagcgcaaaaatgatgcacaaggaattattgcaatcactcaggagattattggattaaaacggatcttaggttaataaggaggctttttagtggcagaaaaagaaactacacaaaaactatctttggataagatggttaagcaagtcgtaaaagacgtaaagaaagataagtcgatcactgaagaagatttcactgctcgtttgattaagccttataacttacaaggcaaggctgtagatcaactagtacaagagtttgaagataatggtattagcattgttgatgaaaacggtgatccttcaaagttagccttaaagaaacaaaaggatgttgaaaaggctgaattaaaggatatgtctgctccatcaagcgtacgcatgaacgatccagtgcggatgtatttgaaggaaattggtcgtgtaccacttcttactgctgatcaagaaattgctcttgccaaaagaattgaatccggggatgaagaggcaaagcaagaattagccgaagccaaccttcgtttggtagtttctattgctaagcgttatgtaggacgtggtatgtcattccttgatttgattcaagaaggtaatatgggactaatgaaagctgttgataagtttgattatcgtctaggctttaagttctcaacctacgcaacttggtggattagacaggcaattactcgtgcgatcgctgaccaagcacgtacaattagaattcctgttcacatggtcgaaacaattaataaattgatcaggagacaacgtcaattgttacaggacttaggccgtgaacctacaccagaagaaattggtgcagaaatgaatatgccaaccaataaagtacgtgatattctaaaaattgctcaagaacctgtttcattagaaacacctattggcgaagaggatgattcacacttaggcgactttattgaggataaggatgcaactagtccagaacaacacgcttcttacgaaatgttgaaggaacaacttgaacaagtacttgagactttaactgatcgtgaggaaaatgttttgcgtttgcgttttggtcttgatgatggtcgtacccgtactttggaagaagtaggcaaggtatttggtgttaccagagaacgtattcgtcagattgaagctaaggcattacgtaagttgcgtcatccaagtcgctcaaatcaattacgtgatttcatggattaattataattatctatattaaaagagctaagttttacttagctcttttttattggactggatctttacctgctgcccttagattatcttcaatgattttcattggatttaaccaagtgccattatctttccaatagtatttgcatggcgtattgtcatgctttttatcaatgtaatctttatctgtcttagtaactcctaaatgaatgtgagagccggtcagtttaccaattttttgtcccaacttgactttttgaccttttttaacataaatatcagtaatactgaggaagccttcctggtaaacttcaacatagccatcatcggaaataatccaaatataaagtcctaaacctggggcgtatttaacacgatggacagttcctgcatgcacagcatatacggaagaatgtccaacttcactaaatccgaagtcatagccatcatgaaaataactcttgctaggatagactcgacgaatgacgtcagtttcaccaaacttttgtccagatttaaatttgattttcttttcatagagcttcttaaaagggtaaccccaagtaagatgaacgacttttttctttttagcagtcttctttttcttaaccgtgtgagtttgtggtcgtaaactattcagattgttttgccataagggaatagaggcaaaagctaaaatagcaattaaagcagctaaaagtgcaaacttactttcagtttttttcattaaaatagctcatctcgctttccgtcaagcatatgttcactaattgtttgttcaaaaaatactggtaaatcatgatcaaaattgtaagctaacttttgctttttcaattctttagcactcatccaggttagtttaccttcgtctgattctttaacggtacccgaaaattgttcagctatgtagaaaaatactaaataacgttcatcattgtgatcataaaattgtttaacaccaactaattgaggatgactaatcgttaatccagtttcttctttgacttccctgacgacagaatcatgaaaagattcatgcgcttcaacatgaccaccaggaaaagtaagtcctggccagaccggatcgttgcgatcaagaactaaaacctgatctttgtttttaaccatgcacatattagttaatgtgacattttctgttctactcatgtaaaaaacccgctttctgtgacgattatatcaaatagtagcaaaataagactatgaaatatgctaaaatttggttaaccatatcttttatggaggaaacatgaatttaagattaaatacgttggcaaagatggtagatcctggcagtcgagtggctgatattggaactgatcatgcatacttgccaattgaattagtaaaaaatggcaaaattgattatgcaattgctagtgacgttgcagagggccctcttgaaaatgctaaaaatgatattgcagcagctgggttaaccgagcaaattgaaactcgcttaggtagtgggttagaaaccgttactcatgctgatcagattgatacagttgtgattgccggaatgggcggcaagttaatgactgatattcttgatagagcttggagcaaagatgcacaatttaaaactctggtactagaacctaatataggcgaagcaggggtacgtaattggctgatgatgcataattataagattatctcagaaaaattaattgcagaggctgggcatacttatgaattaattaaggctagcttaactgaagaaaagcatgagatgactgaaaaggaaatcttttttggcccctttattgtacaagaaaagaatccagttttttatcagaaatgggaaggccaactcgcttattatcaaagattcctggttaatttgaataaagcaagaaaaaaagacgaagatcgaatcaatgaagtagatcatgatattaaattaatcaaggaggaattggagaaatgaccaaagtaaaagacattgttgcgcgtttgcgacaagattttccggaaaacattgcttcacaaggtgatcctgttggtatgcaaattggatcaatggaggctgatgttaccaaagtaatgactactttagatgtacgtccccaggtagttgaagaagctgttgaaaaaggggttgatttcatcgttagtcaccatcctgtaatgtttagaccagcacaaaatttggattttgcgaatgcacaaaacgcaatgtatggcaatattatcaagaatggaattactgtttattcaattcatactaattcagataaagcccaagatggatctgctgattggcaagcagaggaactaggtctgcaagatgttgaaccattttgtctggatgatgatggaattgctatgggtagaaaaggaaagttacctagaacaatgactgcttatgattttgcctattatgttaaagaaaaaatgcaaattaaaatggcacgtctgattactgcaaacaatgaaaagccaattaccagtgtaggatttatttgtggggatggtggtaaatattggactagagccttagatgaccatttagatgcttttattactggggatgtttattatcatgtaggccatgatatgatttcatctggtttaactgttgttgatcctggtcattatactgaaaaactatttaagtacaaggtctatggtcgacttaaaaagtggaatgaagaaaataactggaatgttggaattgagctttccgaggtttctactaatccatttcaagacttattttaattagaaagagagttatatatggaatatcctaatttgttacctagatttttaaagtacgttaaagttaattcgcgttctgacgaacattcagatcgctttccatcaactgaaagagaagaaaacttccaaaagaatgttattatgaaagatttggaagaattaggtttaagtgacattcactacaatcaaaatgctggtagtgtaatcgctgaaattccgtcaaatgttgattatgatgttccagtaatgggctttttagctcatagtgatacggcagactttaattcagaaaatgttaaaccacagattcatgaaaattatgatggcgaaagcaaaattcaattaggagattcagagttttatcttgatcctaaagtttttccacatttgaagaattataaaggacaaacaattattacggcctcaggtgataccttacttggtggggatgacaagtgtggtgtgtcagaattaatgacttttgcggaatatttaatgaatcatccagaaattaagcatggtaagattcgattggcctttactcccgatgaagaaattggtactggtgctgaacactttgatgttgaagactttggtgctgactttgcttttactgttgatggtgaagctcctggtaagttagattggggtacattctctgcggcacaatttagtcttgatattcagggagttaatgttcacccagctgttgctaaggggcaaatgattaatgcaattcaagttggaattgactttcataatcaactgccagaacacgatcgcccagaacataccgatggacgcgaaggtttcttccatctaatgaattttgctggtactgttgataatgctcacttagattacattattcgtgattttgaacgtgatgggcttgaagagcggaagaatttggttaagtcaatcgttaagaaaatgaatgatgaattcggtactgaacgaattacacttaaaatgtgggaccaatattacaacatggccgatgaattaaagaaacatatggacatcgttgacttagcgcgcgatgcttataaagcagaaggtcttgaagtcaatgaagacccggttcgtggtggtacagatggctcacaattgacttatatgggcttaccatgtcctaatatttttgccggagaagaaaacatgcatggtcgttatgaatacacagttcttgagtctatgtggaaagctgttgacgtgatgatcaaaatggctgaattaaatgctgaaagagctaagtaagtgaaacatttttgactaaaaatatcaataattctatttctgatctaatatgagattattgatagattaggaaatagggtaaacatagttaataaataaaaattatgcactaatactattaaaaataaaagatagtttataattaccgtcattataggattatagactatctttttgttgtacttttaacttttatgaacttgtgaaacaaagtgattaaacttagcccttgcaaaaagtgactaaagtaagtattatagttagtgtaatagattaataatacagtacaaaataggagctgagtaaatggaatttaaagataatattcctatttatcttcagattgaacaatacttgtatcgtcaaattgctttaggcaagttaacagctggtgagaagattccttctgttagaaaacttgctctagaattaaccgttaatgttaataccgtgcaaagagcactacaacagatgaacagtcaaggtattctttatactaaacgtggcgaaggtaattttgttactgaagatactaaactattatccgaaaccaagcagtcattaattaataatgaattagaacagtttgttcaaaatatggaagagtttggaataggaaagaacgagttagtttcaacgttagagaattatttaaaaaatggtggggatcagaatgaatgatttattagctattaaagatgtaagttataagaaaaatcagaagcaagtattgcaagatgtgaacttgaatttagctcctggcaagattgttgcgttacttggtgaaaatggtgctggtaagaccactttgatgcgaattattgccggtgtagctaagaattacaaaggcgaaattaatttagagggggcaacaaaagaggcagaaagaaaggctaagttgtcttttactgatggtttaactggcttcagcgattcaacaaagatcaaggaagtggttaaattttacgcaacgatttttcaagattttgatgagaatgaattcgatgagctgcgtaagtttatgaaattagatcctgaaatgaagttgagtcagttatcacgaggaatgcgtgaaaaattgattattgctttaacatttgctcgtaaagcagatttgtatttacttgatgaaccttttggtgggattgatgcaatggctcgaaagaaaattattaattccatcattttgtggaaagatgaaaaggcaacgattttaatctcagatcactttgtcaatgaaatttcatcattgcttgatgaagtggttattgtaaaagatcataccgttttggaacacaagtcagcagatgacattcgtcaaacgcataagtcaatcgaagaatactatgaaagtttttatgcagatgaggatgatgaataatgactagttttaacacattgtttaatcgaatgtttcaagaaaaaagcaagtcagtctatttaatcttcttaattcaagcctttgctagtttatgttttacaattattggttttgtttcggaaaatggtacaccagaatttgttaatggaaaagatactagttctgtcaatgtgattgttgcttttctcgctgtatttgcagtaatgatgctgataacgtcatttatcgctgattttgtttattggattatttcttcaatcaagaatgaaaaaattaatcgcagtcaaacttggcgcttgattccggtaactgatactaagtttttgcttagcaattttgggacagcatttttaacttatatttggttaggaattttagaagcggtcacgataatcgttacccttttgccgatgttgtctgatcaagatgtgcgcaaagcaataggtcaggctagcatccatctttcagcaagagactggcaaacaatgctcggaagtttgctgctaatcatttttattggctatgcttggtacgcaattgtaagtttgcttaacctagcaagccgcagcattattgattttttgccaggtggctcaagtaaagtatggacctttattattagagtaattgtaattattgcgattatttggattttaggccatgcggcaacaattatcttttcagtcttaggaaagtttagtccttttatggtcaacagccaggatattaactatgccactacgattcttcaattcttggtctttgatgttgtgattactttgatcgatatcttgcttttgaataaattcgtagaagcaaaacagaattaggagttttttatggcaaattttaagaccttgtttaagccctgaattgtcaaattaagtgcaacagttaggttatgaagagatatattgcttgaagagttcctctgctgtgtgatattggaggattcggcgatatttgtggttaatggcatcagttgcctgttgaacataagcttttgacttgtctttcatgctcttgctcttagggaagaattgacgcaaaagaccattgcagttctcattggtgcccctttcccatggagaatatgggtgagcaaagtaaatctggcagcccttgatcttggtcatatccgcaaactcagagccattgtcaaacgtgattgatttaaaccaggcaggatgtctgtcaatctccttttgaagcagcctttggcatgtgcttgcccgatagtcaggaatcttgataactacttcaaagcgtgtggttctttcagtcaaagtcattaaagcaggctgattcttgcgtctgacgcctttaaccagatctccttcccagtgcagcggagcttttctgtcttcaacctccttaggacgctgttcaatggaattgccaagatgcttcttgtgcaaagcgtgaccgccatggctgtgatgacgcttgttcctgcgtcttttgagcttcataggcagatcaatattgcttatgtccagcaagccctgatcaatatagcgatagacggttggtgtgctgggacaagggtagcctggcatagtccttttgaattcaccaacgaactcatcgatgctggtggcatcaaatttagctttaaagcgtctggagagcattctcaaaaagacagcataatgcttcaatggattgcgctgatagcagtttttgcgacgcttctcataataaatctgtgcagtatcagcgtaatagtgctcatacaataaatagctgctgtctctttgcaggacgcttccgcgtttgatttcgcgactgattgtcgacttatggcagccaacttcttgagcgataacagtacgggaagttatgccggaatccagcattgcttgaatttgtccacgttgtacgctggttaattgatgatagtgcttagaaatgctagaatttgaattggtcatgaagatcttcctttcttgatttttcgtcacttcaagtttaggtcttcatggcctttttgtttaacacttagtgttgcacttcaattttaaatccggggaccttgtttaagcaaatgtttgtgcaaaaaaggcgctacgctaacttagttttgttattacaagtttttgcagtcctttttttgctggtaatggctctgttagataaaagcaatttagcttatctcaacattagtaaggacagtaattggctagatcgtttgcttagtgcaggaatgctcgaaacgccgattgccgatgtgatttttgttggtctgctttgctggcaaaatgaaaaaatcaacctcagtcaaacttggcagctagctccagcttcaagtgtcaaaatctggctgattaatatgctttctagtttagttgaatgtatttatatttttgtaattcaagtcattttaggcttcgttgctgctatgattgataatttaagtcatcattattcactgcttcatgacttagttgatgctaaagttacttgggcagatgctagtttattaattgaatttctattgttcttaactggaacggttttagttattatgacttttgtcagttttgctaattttttgacgaaagtaattgttgatcaattgccagttaacaataatattgtcattaagttatttgtgatggcagtgattgtgattattgcaatcttgattgctgaacagctaaacgaacaaattactgctatgtatttgcatcgttttgccaaagaagcagcatatgatccattgggtatttcagtggttgagtactttgcaggagcaattgttttaggagcaatcgacagctacttaatgagtaaatttgtcgaacctaagataattaatcgttaattgaaggggaggggtagatagtgacgaatttttggaccttgtttaggcaaatgtggacgcaaaaaagaaaatttatttatttggttttcttaattaatatctttgctgtagtatttttatcaggttattttcttcttttcaaaaattggaatggtctagcaaatctgccgtctaaaaatttagggcaattctggcgcaataattttgtctatgtgactttatacattgattttgccttttgtgcgattacatgttggcaaaatgaaaaaattaatctgagtcaaacctggcatttagcagctagcgatgaacgaaaaacatacttagctaatatatttagcagtttgctggcatgtggttatttcttcttgctgcaagaaatcgttaatagtctgttgctgatccctagttgcggggcagacagttttgctcaagcatttcgtgagtttggtctgtatccaattaaaacagttcccggcgttgaaataactagcaatcgaatgcttgcttttcattggttgtttatcattttgataattttaatcatttacttctttgtcagctttgccaattttagttcgcgagtaattactgatttcttgccgtttaagagtacagtttgggctcgcttgttaattatcgcaattttggtaattgtcgcagcttactgcggcatgatctttatgtctaagttacagggctttgttgataagagtccaaatttacaagcaaccgatccaatctggttagatgatttatgcttgtttattgttagccttgttttcggtattttgaatctagtattcgtgaagaaatatcttgaaccaaaaatagattaattaatgcaaaaaaagagcttcatttcaatcaagaaatgaagctcttttttgtagttaactaagcatttgctgacatgtaatcataaagctgatttacttcttcggctgtgaattgtccatcgccaactttcatggcgtgaactttttcaactgagaggtgactagcaaaggctaggtcagtgtcattaacatggtgttttacttgaaaattgataattgcatcagataattcttcttgctcattcataataatttctccttaccctctaattttaatcaaattggaataaaaaataaaattttttgcaatttcattgattaaaatgttttccattgcgtaaatggccaatacctgaagacgactcggccaactaatgcgctgcgcttaacaaaaccgaagtaacgtgaatctttggaaacatcgcggtgatctcccatgacgaagtaactatccttaggtactcgcttttttaaagtgaaattgttagtatagagttcacctaatttatgtgactttctttggtagccattatttaaatatggttctgcaatttgtttgccgttaatgtaaagcttatcatttttagaagtaaccatatcaccaggtgtaccaataattcgcttgatatacagagcacctttttggtctggtgcttttagaatgacgatatcatttcgtttaggcgtaaaatgacgtacagcaatcaaacgatcgccattctcaaatgtgggctgcattgatggaccagatactgtttcatttgataggaaaaaactaaaaataaagtagtaaattcccatcaaaattgcaaacataataattatgtctaaaacaaagcggccaatgctttcatcatcatttctctttttggtttcaaccatagaatatctcctttgcttgctagtcttattataactgaattctccgccgttgaatggtaaaatcatattaaggtgtttaagtatgacaaaatttttgacgaaattaacaaaattagagcaagagataaatcatactgcggttaaacgacaagttgaagaaatagcattaattgatagttatgtacaagcaggtaagccattgaagcgggcaccacgcagattaggtttattgccagatgaatttgaagaagttttagttgaggtgggaccagataaagaaggggccttaagggatttaaataatttacttaataattttcggcaatatctctctttaatatatggcatctggtctctgcctaatattcagactgcgcagttaattaaaaataagctgcatgtacaaacagcgttagaaatcatggcaggcaacgcgtattggtctcaagctttgactcaggttggaattaaagttcacagtacagactcattagagtgggccaagacgtcgaccactggagctaagcctttttatccagtagaagatttaccagctgaccaagcaattaagaagtatcacacagttaatctagttctatgttcgtggtcaccaaatttcggtcacggagatttagaaactgtggcagcttggcataagtataatccaagttgtcatttgctctttgttggtgaaaaagatggtgctactaattcaccagaattttggcaccaaaattggtttaaaaatagtgcagctttagacgagattaatcattccttgcaaagcttcgattttattaatgaacaggtatttgaaataaaaaatgaattttaaaaagatatttttgttactgattcttttattatcttttttaggaattggaacaatgctctccaatattgaatctaattatgctgacgaattgctggaagcacacggcttaactaataatacccgctattttagaacagatagtgatgataagattagtactttcctaaaatatttggacaaaaattatgcgaatcatcaaattcaactgcatctagataataattatgaaaaaaaacaagtgcttgtttgggctaatcatgccgttactggcttgccaactgagagtggtcgctatttttcgcctgatgattttaaaggacaggtttcttttgtggtgctggggccaacagttaaacttaatttattagatgtgcagaataataaatatgttattttaggcaaaaattattattctgttataggcgaatttaaggactatccacaggtagaaatggataaatattatctaagtacaggaattgatcagccaactgctaaagaccagctcaagaattatcgaattgtagtagatgcaacacctgcagtgattgaaaagattgctaagcattatcatgctagtttgcatattccgtcttttgttcaagagcatcatcgagatcgtttatctgtcgtgccggatattttaatgttagttgtttgcctattggtcggaatgatcacaaatatgttgcttgcaataggaattaagcgtcaggctcgtttaacacgtctacacgatgatttgctgcgcaattgggtaattaaccgcagcgtacgtttatttttaatagaggctatttttgcccttgctacatacttctttttaagatggcatgccttttattcaacatatggttctttaatagttacattaatagcttcctgggttgtaattgtattggcgttttgtgggatggtctattacttagtgagaaaggacaggaaaattgctaaatctaccaaatgaatttaaaactaaatatgaaaaattattaggtaccaaaaaagcacaagaactatttgcggcgatgaatgaagagagcaaaaaagcttttagaattaatacattgaagcctactaaggtttcatatgagcttactgattcagtaccgcaaataaattcagcctattatggtgaagtatcgggggaagatcctgagtgggtaagcggtagtgtttattctcaagatccagcggctatgtttcctgcggcaattagtggtgttcggccaggagagcgcgtgctagatctgtgtgctgcgcctggaggaaaaataacagcattaggagaacaattgaagggtgagggccttttagtagctaatgaaatctctgcaacacgagtaaaggcactacgggaaaatattgaacgttggggcatcagtaatgccttaattactaatgaaagtccagaaaagttagttccaattttttcggaattttttgatgtgattttagtcgatgctccatgtagtggtgaaggaatgtttagaaaaaatccggaggcaattgattattggtctcaagactatgttttaacatgccagaaccgtcaaaaagagatcctcaatgaagctgttaagatgcttcaacctggcggacgcttaatttattcaacttgtacctttgcaccagaagaggatgagcagattgttagctggttaaataaagaatatggttttacaattttagatacagggatacaaactaataagattgatgttggacagcctgagtgggctgatgggaatcctgatttgactaaaacattacgcttttggcctcaagatggtataggtgaaggacaatttgtggcagttttacaaaaagtaggtaaagctagaattgaaaaaaagagcaaaaacaaaaaagccaagcgtgatccgtggcgcttaaccaaaaatgatcaggaactagttggtcaggtaatggatcagtttaatttaccagttgctttaagtgactggcgtaataaagcaaaagtccgtaatgaacatgtctatattcctgcaatcagtttgcctgaaaaaagtaagcttcatgtaattaataatggagtcgagttgggtatattaaagaaaaaacgttttgaaccaggacatcaattggcagaagtgctaggtaaggtaaagcaagaacgggtttatgatttaccgacaattgaagaataccaaaattatttgcacggtgaaaccgttaaagtggacagtgatttgcggggctttgtgttagtcagctatcaaaaattaatatttagttttggcaaaatcgctggtaatcaagtattgaagaacttttacccaaagggattgagaaaatgataaaactaattgcgacagatatggacggaacctggttaactgaccagaaagactatgataaagaattatttttgcgtgaatttgcggaaatgcaaaagcaggggattaaatttgtagttgctagtggcaatcaatatgctaacttaatgactcgttttcctgaggttttggataaaatttattttgtagctgaaaatggggcattagttgctcaaggaagacaaattttgcatgttgactcgttaagtgatgacatatatcaaactttattaaaaataactactgaatatccatatccagctgtagtgatggggctagtaagtgcttatgttaaaaagagcagtggacgagcttataaacaagaaatgaaaaaatacatggagcatattactgtagtagattcttttggagaaattgatgatcagattttcaaggtcagtctgacagtgccagaagataaaatgtctaaaattttgcgcgaattaaaagaaaaatatccggaggttggttttgtttctggtgcagcagactcgattgatatgcaaactaagggaatgaataaggcagtaggtctagcatatttgagtcaaaaattagggatcaaatcaagtgagatgatagcttttggcgatagcggtaatgatgtaggaatgctgaaatatgtaggccgtagttttgctactgcaacggcgttgccagaagccaaacaagctgcagggcaaattattggttcaagtaatgaaagtgctgttcaaaaagaaattgctaaattgcttgaaattaaataaggaaaattatgtaaagtaaaagcactagtaatcattaactagtgcttttactttacagtaactgatcgatttgagcctttaatggtaaattatagtatttttttatttgtaccagggatgctaaatcttttttgccgtaaacagcaattaaagcagccaattcatttttccaattagtaattaattgctctaatccagtactaccattttggatgtattcttgtaaaaaaacatttgaaataccaacaaattttcctcctagagctaaaccttttaaaatatctaggggattacgtactccaccagaaacataaaatttaacttgctcttgccatgccatcagagcagtcaccacagtaggtaaacctaaatcttctaagtatgaaacgtcactggcattacgtgcattctcaatctgggcaaagtttgtgccacccgaaccggcgacatcgaagtattcaatgccatttacttttaaaagatgaatacttgtttgatccaatccaaaaccgacttctttaataataatgggcaaatcgatagcggtacgaattgctttaattgaatcaagccaacgaaagtcacgatcaccttcaggcatggcaatttcttgtattgtatttaaatggatctgaagcgcatctgcatttaattcttggataatttgtttaattgcagagattggtgtttctggattaacattaacaattagtacaccatctggatcttctgctctggcaaccataaaactgtctagttgatcagtttccttagctaaaatgctggcagatcccaaagctagggcaatattttgctgctgggcaacctgtcccaatgcttgattaatttgtttagaagcagctgagccaccagtcatagcattgataaaaaaaggcgcagaaacatttttgccaaacatttctgatcccagaatagttggatcgacttttgtttcaggcagagcagggcgcaacaaatgcagttgatcaaaactattatatttttctttattaaaaaacatctgagctaacttcagatgttcttcttttctttcagatctaatcgacatagaactctccatcaatgagccatgataatctggtgaaccttaaaattaagaggcataattccattatggcgccattcgctttcaagtgcttcaacatcggtattagcatctgtaatcacaatgccacagtcaccattaccagcaccagaagttttagcagctccaccaaaattttctgcaattttgattaattgcgataaacgtggaatttcaatggcaatttggttaattttggcaaagtgctgcaacaatttacggttagcccgaatttgttgtttgattaaagcaatattgtttgcttcgaaaccttgaaccatctttaaaacacaagctctagaagctgctaagaaatttttatattccatattcaaagccgccttattagcgttagtttcatcaacgaggcgtgaagttgatgctggcttttgactccaaccaatcatcagtttcatatctttaggaggagttagtaattcaacttttaagccaggccaagcttcattaacgacttgaactaaagtcttattagctaattcttgctttaaccattttttgtcaaaagtttggtaagctaaccagccgccatagacactagctgcaatgtcaccagctgagccatttccttgaactgaatagtgtgaaatagccgataatttataaaccagttcattgctcatttttacgccataaaaacgcaagatagctttaactgtagctactgtgacggctgcacttgaacctaaaccatattttttaccatctgcagaatctaagtctgaattgacgtgtaaatcatagactttcatcttgatattttgctcaatacaatattgttcagtaaatgaaatagctgacaaaatatattcaaaagggttgtcacgattatcgattaccatttttgagccctgacgaacccaatgaatcgaatcctgtgagtattgcttggagtgaattaagccagttgcccctttactcttagtgattgacacacgtacaaattggttaactgctactaaaatagcaggacaatcttgctctaatactgcatattctccggcaatatataactttccgggcgctttttctgttatcaaaagaactaaatcctcgaatctaattaacttttttaattacaactagtccaaataagtaattccaggaccaaaacttgcattcactatattaacattattaaattcggacgaaaagcgttgaatgatatctttgctatttcttaattggcaaagtaccttaatatttggtcctgcatcaattgtatagtaacattcaattccttcagtacgaagttgttcaactaatttaatagcttgaatggtttgcggctcaaagtaagtgaattcaggctgtgcagttaaattaattgcatgcatttcatttgcatttaactcagctaactggcctagggcagtgaaatcattactttttatagctttgatcatttcatttaattctgaattgttgcgttcaagccagggcctgaaaaatggagaagattgggcatctttcataccataagtcgaagaaatctttttttgtttggtatttaattcaactgctaaaaggtgaagatccatcgttggtgtttcatctagtgcatatgcgtaagatgtttcgtcgctattacctttttgccaaacagcaaaaccgccataaacggagcggctggcagaaccagatccaatcctggctaaacgagataaatcttctagatcaatgttgatgtcatagcattgacaaaaagcagcagctagtgccgcaaaagcagaactagatgatgctaatcctgcagaagtagggacgtgattgacagatttaacgattaaattgccagtgacgtgaaaacgagcctgcaatttttttagataagcaaaaacacgttgactagctgcagcagtttgctgttgattatttaagaaaaattgattttcaccatctgttttttcaacgctagtatcagtataaaaagcatctaaagtcattgataaactagacattaaaggaagacgtaatttgtcgtcagctttgccccagtacttgattaaagcaatgtttgtatgtgctcgtgcggttctattcattaaatctcctcaatccagtagtcactaattaaatctttacatttagaggcaatttcttgggcgacagtttcgttatcgcacaaggaaatagtaatgccgccaagacctccgcctgataatttaaagcctaaagcgttatttgacaaggcaattttttgcagttggtcaattttatttgttgaaagatcaaatgagtgcaaaatttcttgtgcttcattaaaaatctgtccaactgcttgacgatcgtgcttgatccaagcttttttagtaagatccgctaattcacccaagcgagctatttttttcttggcatagtcggacttttcaagcatttttttaactaaaaaaacagcttcctttgtattgcctagttgaccagtatccatgattaacagggtagctcctaatttggtttgtaatattttaggccccatttttttattaaaaaaaactagataatctgaattaacagtggctgcatcaagaccagaagctttaccatgattgatcatttcagcatgattagttacagtcataatttctttttcagtcatattcagctgaaagaattggttcattgccctagtggtacctaatgcaacagtagcacttgaaccaaaaccatgttccattggaatttcaccagtgtatgtaattttaagtggatggttattgccagcctttttttgcatatgtttaactacgtattttaggccatcatattctgccggtgcttcaaataatggaccgtggtagcgagcggtatccatccacatttgagaagcagattcaacagtagttttaatgtgtaaagccttaattggcatagctaaagcatcatatccataaactactgaatgctccccaataataattaccttgccatgagctaaatagctgcttttcatttttaatcatccttaaactagatttatacaaaagattgcccttgctatgataaaataaaaagcaaggagtgcgaacaaatgatcaaaattcttacaggacgacaaaccgacccattacaagaaaaaattctggaagaagcagttgaaaactatcagcaacacccagaacaagaaacttttatcatcgttcctaatcatattaagtttaccacagaagttagggcaattaacaaattagcaacaagcaaacaacaaactgagactgcagttaaaaatttgcatgttttgtctttttcgcgtttagcttggtttttcttaaaagatgccgagcaaggattgcctaatcaactagatgatgcagctagtgcaatgctcttagctcatattattgagaacaaaaaagatgaattgactatttttgaaaatgttaatgttaattctggattagtaaatcagctttatcagacaattttgcaagtctatgacggaaatttagatttagacgagatatcagaggataatttagatcaagaaactaaaaataaattacatgatttgcggattatctatgatgcctttattaaagaaattgcgggtaaattctctactaagaatgaggttcagctgcaactaaatgaaattttagctaaaagtaaaaatttaaagcaagccagtttttatttctgtgatttttcacatttttcattacaggaaacactaacgattaaaattttgatgcgtaaagcaaaagatgtaatccttgcatttaaaacgcgcttaggtgaaattaattctagtgcggaagaaggagattatgattatgtaatccagcaaactattaagcgcttaacgctgttcttacaagagagaaagatggactacgtgacagcaacttttccgcttaattcgcaatcaaatggtcgtgaaatattaaatagtctttggacggagacaattcctaaagttgacgaattgaagcaggtacaattagttaaagcagactctcgatatgcagaggcttattttgtagcgcggactatttatcaacaggtagcactaagcaactatcgctatcatgattttttgattttagctccaaatttaaaggaatacgagacttatttgacgccaattttacgtcaaaatcagattccattttttaatgatttacaacaggaaatgaagtatcatcctctggttgttttaattgaaagcttatttaacttacatgagaatccgtttcaaacacaaaatatgctagccatcctaaagacacacttgttaataccttcttggtataaggaagaggcggagtatattcatgatgttgatgaactagagaattttattctggctcatggtattaatcataatttatggaaaaaacactttgataattttgtgaatgctgaagtgatccgcttagacaaaatggatgatgaagtagctaagatcgatcgtttgcgcagctacttggttgataagatttcaacatttttcaaaataatagagcaagaaaaagatagtcaaaaggcgttaacgatattttttgagttcttaactaagaacggaattgccgaccgattagaaaaatggcgtgatgaggccaatgaagccggtgatttacagcaggcgcagcaaccagagcaattatgggatttattaatgcagctgttgcaagactatttagcaattaatcctgaaacttttgatttaaatgaattctttaatatgttaattagcgctttccgagaagcaaatttttcccaaattccttcaacacttgatgcggtaaacctttctgaaatggggatggtacaaactagcggctataagcaagtgtttatcattggcgctactgctaataatttaccccaaattcagaaaatgccaggttttttaactactgaaaacttgaatcagctacaaaatagttttaattcagaatcttacttagaagatagtcaacagcttaataacttagaccaaaattatcagtttggtttgtcgctagctttagcacaagatagggtatatgtatcttatccagtacttaatgcttcaaatgaagagcttgatccttcaatttattatcaacgtttaaaggattatggtgctcagcaatttgttcaacatgatttgccagaaaagatgcaggatcttttgtctttcattactaaccctgatgcaagtttaggctatttaacctatatgaattcaataaattcaggtcttgctgtgcaagagttattaaaaatcacacaggagcaactacctcaaaaaacgaagacagtgcttgaagcaagtgattttgataaccagccagaaaatattggtcaggacttggctagtcaattgtatggtcaaaacttgaattcatctgtgtcacaactggaaactttttatgaaaattcatatgaatatttcttgaattatgggcttaagctgcggcgacggtttgaaaatgaatttgatgttattcaggctggaaactattttcacgagacttttgaccgtttagtgaaaaaactaaacaagcagcataccgacttagcagatttaagcagcatagaactggaacaaatgcttaattcggtgcgaaatgtgatgaaggatgaaggaaaatattctcaattaatgaatgatccttttaatcaatatcttttcaagtgtctagaccatactacttctaaggtagctcataattggcggcgctccttgaaggaaaccccgttacgggctaagtattctgaattaagttttgggttaggtgaaaaaatcaaaggattaagcttaaaagtgccagatatatcaggtcaacataaagttgatttgcgcggtaaaatggaccgggttgatttggccaatttcaatgataaggatcaagttttagcccaggttattgattacaagtcatcagctaaaaaatttgatcttgggatgttttataacggaattgctttacagatggtttcttatttggatgttttgactaaaaatgatcaattttttgctggaaaagatcgtctttcattattgggtgctttttatcaaactgttactagacaattagaacgtttgaatagcaataaactaattgatagtagtttaaatttgaaaaagggagcaactgatagtaagcccaagctgatgtatactggcttaatcagcaatgatccagaaatcttagtagaagctgagccattacttgatgatcatcctagctattcttctgaactgtatactggggttaaaactaaggctagaggtggctttagcttgccacgtgaccgcaactttagtgaggaagaaattgaattactgctagaatacgatgagtatcttattcgacaagcatcaagccaaattttatctggaaaaattgaacttaatccatatcgttatggcaaagcgaagaatgccttaacttattctgattatcgtgatgtcttcttttttgatgcgatgctgcgtcaaaatcaatatcatgaaataaacaatctgaataaaaaagaattaattcttaaaatcaaagagaaattaggaaaggaacaataaaattgtctcaatttactaaagagcaacaacaagcaattgatgatcgtggtcatgatattctggtttctgcttctgcgggtagtggtaagacaactgttcttgttgagcgcgttttaagggagattctttcgggaacccaagttgatgaattattagtaattacatttaccaaagcagcagctgaagaaatgaaaactagaattaaacaggcattatcagctgaattagcaaagccgggatctaatcgcagatatttacgtgagcagctaaatcaagtggatactgctaatatttctacaattgatgcattttgtctagaagtaatccatcgcttttattactctgtaaacttagatccaagttttagtattctaactgatgatactcaagctgcattgttaaaagaacgtgcattacgtgaaattgaaggggagtttctagaaaagaaagacgtaaattttaggcatttttatgataactttgcaggggatagagatgcggatagtccgcgcgacttgttgctggatttgtatgattttgccatggccaaacctgagtatcgctcatggttaaaaaaattggttgatgtttacgtggttaatggcagtatcgtggaatctgatttgtggcaaaaacagattaagccatacttgcttactagtattggcgacttacaagggaaaattaatgattatttagaaaatccagtaatagaaacaaaagagctagctaaggctaaggaagcttttaccttgtttgcacaaaatttagatcattttgtttttgctttagaaaatgatgcagactacgataaacaacgaaaactattacgttcgtgtgtttttacagcgaattatcgtaagtcaagtaaatgggatgaagatgttctaaatttttatgaagacctacaaaagttaaaagatgaagcaaaaaatttggtttttgatacttttacttcattttttgctgttgatgaacaagaacaaattaaagtcatgcagcgcggccaaaagattgttgctgcaattgctaaatccgagctagccttgattgatcggtttaataagctgaagcgcagtgaaaatttgcttgactatagtgatatggaacaattggcttatcagattttgagtcaagatacatcgaattctcaaatggctcgtgaattttatcaaaataaattcaaagagattttgattgatgaatatcaggatattaatgctttgcaagaaaatatcatccagcaaatcaaaaataaagataaaaatacgcttttcatggttggtgatgtaaagcagtcgatctatggctttagacaagcagagccaagcttatttttgaaaaaataccatgattttgccaatgatgataataaacaaaccaaaagaattctgttgtcagataatttccgctctactgagccggttaccaaaattgtaaatcaagtatttaaaagtgtgctaagttcagattttggcgggattgactatcaaaaagaaggacaattaatttttggtgctaagtattatcctgaaaacactcctaaagctagtgaagtaattgttcatgaaaagaaaaatagcagtaatgaagatgaaaatgagatagatttttctgaaattcaaatggttttagcacgtattaagcaactaaaagaagagcgtgtacaaatctttgatagtaaaacaggaatgagagagttacgttacagtgatattgctatcttgactagaagtcgtagtgataatttggaaataatgcaggaatttgctaagcaggatataccattatttgtaactgatgcgaagaattattttcaaacttttgaattgactgttatgatgaactacttaaagatcattgataatcccgatcaggatattccattagtttcagttttacgttcgcctttgtttaattttggtgaaaaggatttagctaaaattcgtatcaagagtaagaactctactttctatagtgcattgacttcttatgtaggtgtaggagatgaattaagtactcgaatcaaagattttttaaatcaactagctgatttgcgcaagtttgccacggcacatcgtatttctgaattgatttggagcatttatgctaggacaaatttattagagataatgaccgcactacctaatggtgaacagcgacgagttaatctagaagctttatatgaacgtgctgcttcatatgagagtgcagggttcaagggattataccaatttatcaattttattaatcggatgcggcaaagtcagaaggacttggcacagcctttattaactaaagaagctggtaatgcggtcagattaatgactattcatggttctaagggactagaatttccgatcgtgttttatgtggggatgcagcataaatatcaaatgcgtgatttaaaaggtaactatgtgattagctcagatagtataggaattacgctccgtgaagaacattatcggattgactctttagttaaagcgatgggaaatgtaactaaaaaaaggcaattattagaagaagaagcgcgaattctttatgtagcattaacgcgggctaagcagaaattaattttggttggcgatgttcctaatctggataaacgagttaaagaatggtcgactgaactaaatcagattggtcaattatcattagcagataagttatcttccactagtccattgagttttatgggacctgcgttggctttagatcgacacctagctgtgaaaatgtctgatattactaattcgttggataagagtcagtcgtttttgtatattaattatgaaaatgctaacggtgaactacctgattatcagaaagcggagacaagtaatgataaaacacaaagtaaccttttaaatcaaaccacgaaacggctttatcaatttaattatccgtttaaagatgctagtgaaactacagcttatcaggcggtatctgaaataaaaaaagcattcaacgatccgatcgagaccgaattagagaatgctcacttattgacatcgactaatcgttatttacaaccgattgatactaaacctaatttcttgtatcaaactaagtttactggtgcagaaatcggaactgctacacacatgattttgcagtattatgattatcaaggcaatggtgctgaagatcaactagaagtagaaattcaagaattgattaagcaaaagaaactgaatccagaaattgtttctagtttaaagaaagaccaaattgagtggtttgttcatagcaattttgccgaggaattttggcaaaagccagagaatttaaagcgagaaatagatttttctagtttaatctccgctaaaactttgtttaaaaacttttcagatcctaatgccaaaattttggttcatggtacaattgatggctattttgtcaaaaatgatggtattattttgtttgactacaaaactgaccacgttgatcaatcgcatttatctgaatcaattgaattgattaaagaaaaatatacaggtcagcttagactatatgaacaagctatcaatgaatttagtcaaaaaaaagttattggaaaatatttaattctgcttgatgctaaacaagcggttgaagtgaaatagaggaaggaggaaattatggcaaaaagttttactaaagatacatttgctgtagttgatctagagactacaggaacgcaacgtgagaatgggcatcatattattcagtttgggtgtgctattattaaaaatcgcaaagtagttaaaacttattcatttttgatcaatccgcatcgtgaaataccacaatcagttgttaatttaaccggaattcatgatcaagatgtagcaaaacaaagagattttgattattatgcacccaaaattactaaaattttgcaaaatactgttttcgtagctcataatgttgactttgatttgccttttttgaattatgaactagtgcaacatggttatgaggcacttacaaataaagcaattgatactgtagaactggctaagattgcttttccgacttttccatcttataagttgagtgatttgacaacacaattggggattaaacatttagatccacataaggcagattctgatgcttatgggactgcagttttattgcttgaaatttttaataaattagaaagtctacctcaagctacactgaataccctcagttcattatctcatgggcttattcgggatacatcttgggtgattacaacgattgcagataatttacgtcaagaaaaacggcctttaggtaaagaatatatgcaagtgcgtaatattattctgcaaaaacaaaatgataattctgaagcacatggtgggaatgctaaattcccaaagactgactcagagaaacaaaagctatttaaaggtcatttacactttcgtagagctcaagtcgacctaattaatcatttgcatcagtttattaatgatccagataaaagggcgatgctaattgaagcacctaacgggactgggaaaactttttcttatctttttgcttatgcttatcagctttattctggtagaaaattagttgtagctacaccaactaaagtgttgcaagaacaagtgattgaacatgaaattccgcagttatttaaggtgactaagttggatttgactgcagaagtagttaagtcaagtagtcgttaccttgaccttgacggatttgtacagacgatttttcaaggtacaccgaataagcaaaccttgatattacagatgcagatactggtttggctgactaagactaaaactggtgatttagatgaattaaatttaactaactataatgcaccactctttgcacagattcaacatccaggggatgcaagagtaggtagccgttttgcaggggtcgatttttggaatttagcgcgtaaacgacaagaagaagcggatatattgttgactaatcatgcttatttggctaaccactatatggatacaatttggggtcagaatccgtatttagtcattgatgaagctcatcgtttcacagacaatgtcgtaagttcgcgtaatgattctttgcgttttgaagctttgtggggagttttaagtcatctccgtaatttgctttatttctcagatgaaagtgttgaagcgcaatttaatgatgatgtgcagctgaaccttttactaaagaaaatagatcctaaaattttggaattaattcagttaattaatgaattacaaaagcaactttattttcaaagagataatgctgttaatcggacagttttagctaatggtaatctagaacttagttttcaaggaaaaagtttatttggcggaaatagcaagtttaaagcgattttacctaagttccaacaaaaattagaagaggttagggacttaactaatcaggttttatttgaattatataatgaacaagaacgcatgctggctaatgttgaggtattagtcaatgagattacggaacaaattgatcgcctagattattactctgaaaagggctatcaattggctgatttgctttctgatcaaaaaggtttagagcaagatggctttattttgatgattactaatcctgatgatccactaagtaccaatttagactggttaatgcttgatgctggtgaagtattaaaacaaatctatagtcgttttgaccatattgccttcgtcagtgctactttaaccagtaatcgaaattttgaatatgcaatcaaccagttagctttaacagaattacatccggttgaatatattggtaaaagtacttttaatataaaaaagcatttacaggtactggcagttaataatatgcctagccctgatagtgaagaatttgaaaagactattgcacaaattttacttagtgacattcaagataagcaccatgtacttgttttgatgactaatttagaaaaaattaaaactgtttttaccatgattatgaatgagccacagctaaaagattttgaaatcttagcccagggattgtctggttccaataaccgaattgctaagaggtttgtaattgctaaaaagtcaattataattggtgctgatagttttggggagggaattgattttcatgattgtgggattgatactgtttttgcggcaaaaatcccgtttgaatctcctgatcaacctgaagttcgtttaaggcagaagaaattggaagatcagggaatcgattcttttactaaagatagtttaccaagagctgtcattcgttttagacaaggaatgggccgtttaattagaggagaacaggatcatggtcaatttgtaattttagacccaagattatggactaaagattatggtcaagagttccttcaaacgattcctgtcaaagttgaaaaggttactagagaagaattaaaaaagaaattagaaaataaataattatgttacaagatgatacaagacaaacaatcaagtttgtgagttgggtaattggtttgataatagttgcctttctagccagcattgctatcttttattatgctggatctagaagtcggggcaatgatcaaaaagttacgcaattggctactagtaaaacaccaattagaaagattcaaaactattatcatttagatcgtggcactagcagctatgctatagcaggcaccaataataagggaaaacaatattactttatttatttgccaaattctaaaacggcatatctatatcctgcggccaaaggaatcactgaatctaagattaaaaataagtttaaatctatccatacggatgctacaataaataatattaatcttggttggtataagggtgaggccgtttggaaagtggcctacaaaaaacaaaacggcaatctaggttatactttatatgaattcaaaaatggaaatgatatctcagaagtcgataatttatagaaactttggtattatggaaactgtataattgatgaaaaggtggataggattttatgacagaattgatttcaattaaagattcttctaaacatgttgatgaagaagtcaagatgcatgtttggttaacagataaacgatcaagcggaaagattatctttttgcaattacgtgatggtactgcatttttccaaggggtagtacgtaagaatgatgtatcagaagaagtatttgatactgctaagtcacttagacaagaagcaagtttttacattactggtactgttcatgaagacgcacgttcacactttggttatgaaattcaaatcactgatttaaaagtggtttcaaacaatgaaggttacccaattggtaataaggaacatggtgttgactttttacttgatcaccgccacttatggttaagatcaaagaaaccatttgctattatgcaaattagaaataccatgtttaaggctactgtagatttctttgaaaaagaaggctttatcaaatttgatgcacctatctttatgcattcagctccagaaggtactactcaattattccatgtagaatactttgaccacgatgcatatctttcacaatcaggtcaattgtatggtgaagccggtgctatggcttatggtaagatctttacttttggtccaacttttagagcagaagaatcaaaggggcgtcgtcacatgactgaattctggatgatggaaccagaaatggcttggatgcatcaagatgaatcgttagatattcaagaaagatatcttgcctacatggtgaagcaagttctagaaaataatgaatatgaacttaagattcttggtagagatcctgaaaaacttcgcccaactactgaaggtaacttcgttcgtcttccatacgatgatgcaattaaaatgcttcaagatgctggacgtgatattaagtggggcgatgactttggtgctccagatgaaggctatatttcagaacaatatgatcgtccagtcttcattgtcaactatccaacctcaattaagccattctatatgaagaagaatcctgataatcctaaggaatacttatgtgctgatgtaattgcaccagaaggttatggtgaaatttttggtggctcagaacgtgaaggaaattacgaaatccttaagcaacaaattcttgacgctggtttgaatttggaagactaccaatggtaccttgacttacgtaaatttggtggagttcctcactcaggtttcggtatgggctttgaacgtactattgcttgggtttgtcaccttgaccacattcgtgaagcaattccattcccaagattgattaacagaatgcaaccttaatttggttaataattaaatattgatacacaaagttggactagttattagttcaacttttgtttttgaaaggaaattattttggaatttaatgattatcgggcattaggctttacaaccttacaaaatggattgatcgcttactaccctcaattaggcattagtgatgctgaactaattttgataatccaattggaagcatttagccaacgaggtgagagttttccatctaatgaaaagattgctgctaatactaatttatcggttagtgatgtgggtaatcttattcagcggctaattgaacgaaattatttaactattgaacaaatgactgatagtcaggataaaattggtaataaatatagtctcaataagttgtataatgcacttgatcactatattgatcaaaacgtcttgatcaaagataagaaaaaagataaaactgtttcagttgctaataatttagaaaataatccgttaaattatttatcacgaaaagtagaagttgaatttggtcgctatctgagtccaattgaacgagaagagattgcgcaatggttaagtgtggatcactatgctcctgaattaattgaacttgctttgcgagaggctgtattgtctcaggcatattctttaaagtatattgatcgtgttttacttaattggcaaaggcatagtctgaaaacaactgatgaagttgagagatttttgaaaaggaatcgataaaaatgacagaagatttattgagtgatgaagaagcacgtaaagttttgaaaaaaattttagcattgtatcctgacgcacaaggtgaattgcaatgggatactaactttcatttactttgtgcggttatgttgagcgcacaaacgactgataagatggttaatcgtgttatgcctagttttagtaaaatgttcccaaccccagaagtattagcaaaagctccaattgaagagattgagcatgagataaaaactattggtctatttcgttcaaaagctaaacatttaaaggccactgcgcaaattttggtcgataaatataatggacaggttcctaaggataaaaagttattgatgaccttaccaggggtgggagagaaaactgctaacgttgttttggctgaaggctatggtgtgccagctattgctgttgatactcatgtgtcacggatttctaaaaagttccatattgtagatgacaaagctactccacatgaagtagagaagcgattagaagcaattttacctaaaagtgaatggataaaaacgcaccatgcgatgattctatttggtcgttatacaatgccagctcgagctaaaggcgatccgtattcttatttaaattccgaaaagtaaagccgaaataaattcggctttttttattgaataattttatataatctgttgttactaaattttaattttataatttcaggcctcaactacgtttcggccaaaataaaaacaaataacaaaacgctatctgttaataaatatatttaattattgcctagtcattatccgaatcatcattacgttcatgtgattcttcctcaggttttctcgttgatgaactttgttgtgttgaagaagattgtgtttttctttgagaggaagaggctcgctgactgctattggattgagatgatgagccattttcacgacttgatgatgattgagtaactgcagttctagaagatgaaggagtagttccagtattatcgcttgaagtatcagtttcttcatcgtcttcatcataacttgctgcactattaccaattccggctggggcatggcctcgaacaaataattgccaagtgccgccactagttgctaattctggaggattagagttatttacaattttcgctcttacaactgagctaggctgtttccagtctaggttaggtttattgttcattaggtaggtcatcatactcttatacattagctgtgcagattgttgacctattccagagatagtaccgtcctttaaattatcgtaaccagtccaaacacccataacatatgatctggtataaccaacgaaccatgaatcttttggagttgaattatagcttgggtacttagctagatcttcatcagagtatttaacagtaccggttttaccagcttgataaagatctgcaatttttgcattagtaccagagcctcgtttgattacgcctttaagcatatcggtaatcatataggcagttgatttcttcattacacgtacaccatttgaatcataatttctagttaatccatctggtgtttcaatcttagaaacaaattgcggcttgtggtatacgcccatggtggcaaaagcactataagcaccagtcatttgtaaactagacgcattagcgccaattgcaactgataagccggattttgatgaaacgttaacgcccattcggcgagcaaaagctgaagcccgttttactccaacttcagcaagagttttaacagctggaacattacgtgactgctccaatgcatgtcgcatagtcatcatcccgtcgtatttgttgtcccagtcatataattggatattggtaccaggataaacatacttactgtcatcaatcatttttgctgttgaccaattcaagtattgaatagcaggtgcatagtcaagtactggcttaattgacgaaccggtagagcgtccagtttgaacagcccggtctaatcctaattgaacagaaggtaagtgacgtccacctaagattgcaacaacatgaccattgtttggatcaactacagttgcaccaatttgcattttattgtttgtaaaaggtacagaaccgttgttagctaactcgtacagcttgttttgagctttttgatcgatattaatagtaatctttaaattatcgtgatatggatcaaagcctttgctcttaacttcagaaattacctctttaatgtatggatcatcaatttttctaatcttagactcgttattatttcgatgtgatttaagtcccttactaattggttcagcaactgcttgattgtactcagctttagtaattttgtcattttgtagcatagtctttaaaacaatatcacgccggtatttggccttttgcggataaagatatggatcatatgcaacaggtgcattcggcatccctgcaatcaatgcagtttgtgccaaatctaacttacttagtggcttaccatagtagtagttagaagcagtacccatgccataatttccatagttcataaagactttattaatataaaattctaagatttggtctttactgaattcatgttggactttcatagctaaccaagcttcttgagcttttctcttcagagtacgttgagaagcagcagtagagaagaccgttagcttaactaactgctgggttatagtagaaccacctgcagcaatactattacttttggcattagttaacatagaaccaataattctaattgggtcaacgcctaacttatctttgtaaaaacgtttgtcttctactgaaactacagcatcttttaattgctgaggaatgtctttatttttaacataaattcttttttcagaaccaagtgatagtaaaaacttaccattattagtatatagacttgaagatttaccactctgcaattggtcctgactaatgttaggagcatctttggcataaaaagcaaaaagcccgattccagagattactattaaaaatatcagcaaaaagatccatttaatgattctaatccataagtggccactacttggccttcgaccatgatagtctcttcgtgattctcgtttcatattattgttattatctgccatgattatcttttcctatctgcaatgaatttatctaccgccttaagataaggcagtgtaggacgaaagccacttttgatttcaaaagaattgttttcaatttcttttaaagtcattgagcttttatctttttttcgccaagctcgaattacaaaactagctggagtaacaaagtagcgctctaagctagcgaacctaataattgtaaaacaaattccttgttgttttaagcattcgtccaagtgaaaaatttggtgttcatgaaagttttttaatgggaagttagttttattccgtgtttcttttgcctcaaaatcgagatagtatcctttataaacaccattatagtcagttgttgaagcttgcctaaagtaagcttcacgaatgaccgccttagaacgtttgggataatcaactttaacaatttgaattggggttggctttttatgaacaactgcaatttcttccattaaataatatttattagattcattgatttgttgctcaagtgtcatcccacgatcagaaaagttaacaccttttttatgatgatatgatcggtgaactggatgttcatcttttttagttacaggttttctaaatgcggctaaactaccgctaggatatttgaccattgtcctcactcctgttagcattatagcaataaagactacatttttgaacataaaggggggcttaaacaaatgcagcgtttatgggtgactggctatcgcagctatgaattaaatgtttttggcgatcgtgatcccaagataactgtcattaaatatgccctaaaaaattatctgacaagtctactggatgatgggcaattggactggattattactggagctaacctcggtgtcgaacagtggacagctgaggttggacttgaattaggagaaaaatatccggtaagaacatcaataatgattccatatgaagaatttgctaatcgatggaatgatagtaacaaagctaaattcttaaatttgaaggaaaaagtggacttttttgcttcaacttctaataccccttatcaaagtccacttcaattacgtaattatcaaaattttatgattcagcatactgatcgagcattgatgatctatgattcagagcacccaggtaaacctaaatatgattataatttaatccaaaaataccaggaaactaaagaatatccattagatttaattgatttttatgatttacaagatgcagctgaagaataccaagaaaatcatcaaataaatcatttttctgaataatatggtaaaaattttattaaagtctgtttctttattttcagtcagcgttgtttttgctaaaatagggtggaatgtaaaggagttgtcagtaagatggcaaatttaaatgatataaaattatcaggacaagatatattaaagaaacaattcaaaagtaaagtaaagggatatgatcccgatgaagttgatgcatacttagatgaagtaatttctgattatactacttttcaacaaattatcgaagatttgtatggtcagatcggtacgctccaacgtcaattaatggatgaaaagcaaaaagcaaagaaaacagttgaggctgaagaagaaaaggttaagacttatatgccaacgcatagaagaagtgcgcctgtgaagtttgcagaagatgcagatgatactcaaggtgaaatttcgactaatatggctattattcaacggatttcaactttggaaagaaaagtttataatctagaacaacacgtttatggattaaagcattaatttttgctataatgactaacagtgtgaattttgagtaggcgcggctagcttatgttagctgaggaaagtccacgcacacacagactgcgatgtttgtagtgatcgtattcagcctaacaagctggaggaggacgttagtcttcacggcggaaaaagtgctaaatcttcggacatgcattactatcctgaaaagtgccacagtgacgaagcaaggtcagaaatgactttggtggaacgaggtaaaccctgcgagtgtgaaacccaaatttggtgggggagtttcggcctaaggaaatgaactaaaggtcggattattgctttaagcagtaaagatagatgactactgaaggtaatctttgccagagattattggaacaaaacgtggcttatagaaattcacacaggcagagttgggcttttaggtccagctcttttttattttgaaaatgaaagagtaacaatgaaagaataccaactttacgcaactatgggcgctggttttgaaagtgtcgttaataaagaattacagtctatggggtataagacccgtgttgaaaatggtcgtgtcttttttaagggtggtcaagaagatatagttagaactaatctttggctgagaacagctgaccgaattaaaattttgctaaaagagtttagagcaacagattttgataccttatttaatgagatttatgattttgattgggccgaattattgcctgttgacgctaagtttcctgttcaaggtagagctgtaaaatccaaattgcactctgaaccagatgtacagtcaattgtaaaaaaggcaattgttaataagatggttgaccagtaccatcgtcgtggctttttgccagaaactggtaatgaatatcccttagatattcatatttataaaaatgtagctcgaatttcgctagatactacaggcgctagtttgtttaaacgtggctatcgagtagagcatggtggagcccctatgaaagaaaactttgcggccgggctattaaaactaactccatataatggtactcaccccttaattgatcctatgactggttcaggaactttagctattgaggcagcattaattgctaaaaatatagcaccaggaacctggcgtaaattttcctttgatggttttgactggtttaaccctaaactacataatgaagtattggcaaaggctaagagtgaagttaagccgcttgaagcaccgatttgggctagtgatattgatcagtctgttcttgaagtagctaaattaaatgctcacaatgcaggtgtattgcaagatattcgctttaaacaaatcgcagttaaagactttactactgatctagaaaatggaattataattgcgaacccaccttatggtaagcgattgaaggatcgtgagtcggcagaagagctgtatcgccaaatgggagaagtacttagaccgcttagttcgttcagtcagtattacttaactgcagatcctaactttgaaaaatgttttggtgcaaaggctactaagaagcgcaaactatttaacggaaatttgcgggttgatttctatcagtattgggctaacagaaggtaagaaatgattacaaaagagcttaacacagaattttgggtgatctcagatacgcacctaatcgcagatagtttacatgatgaaggacaagccttttcacgcatgcaaaaaactagtcaaggtaaggatttgtattatcaagaaatagccctttctgcttttatgcgaatggcacaaagaaaaaagcctgccgcaattattgtaactggtgatgtgacatttaacggtgaacgagtttctgctgagaaatttgctcaaatttttaagccgttgaaagaaactaaagtgttagttttacctggaaatcacgacatttttgatgggtgggctagagaatttcgtggtaaaaaacagttctatgctggtgaaattagcccaatgttttggcgctcgatctttgataaatcatatcgtgaggccttagatgaagacgataattcattggcttacagtgtccaactgaatccgcaatatcttttagttttagcggattcaaatatttatggaaaagaagagacaacagaagcaccgcacactcacggcgaaattggaaaagtacaattaaaatggattgaaaaacaatttcgttatgcgcaggaacatcagttacgtccggttttatttatgcatcataatttatatgcacataatccagcagttaacaagggctatgtagttgatgacgctgttgagctacgacgtttgtgtgcgcgttacaacgtgaaattagctttttctggtcatattcatgctcaaaatattatgggaccacaagacatgacgcctacaactgagatcgttacatcaagtttttgttctaatgatcaaggctatggagtagtgcgagttcattcacggcacattacatatgtgcggcgtaattttgatatgacaagatatttaacggatgaggaaaaggaaaattatactttagttcattatcataagtatttaaaagatctacagcttggtagtatttctgcggatatgatgcaaagtgaattaaatcagtatcacgaagacatcgagttagttagggcgatggggaatttgtttggctggatgaactatcatttctttaatggtcataatcatataaaggctagcgagttgaataaaatccatgcttctaaagaatatcaagttttgattaagcaccatcctgagtatcggttatatctaaagacgctgtacgacacaagtgatcactctaatttacaagtgaagatacgatactaaacaaattttagtataatggatactgattctaaagaaagcggacatgattatgttaaaagatgaaacaaaatttgatcaattagggcaaaagctttttatgaaaggtgttttgcaagacttcgaaaagaaaaatggtccaattaagggcagaatgatggttacagaaggaaagattccgccggaaatgttaactaagctgcaatctgaattgatgaatagtagtaattggattgtagttgaaggtagttttgatttttataattatactgtcggcatgattgtagatttgactacaggtaagccattagcaaatggatggttggtaccacaattgggtcacccagggatgcaacctgcagagaaatggcaagaatttttgattgaaaaagtcgttgatgcaatcgatgaaaaaggtaagattaatttgccgctatatgtttggatttcagatcgtagtgatttgaccaagacggatcaagatttataaaaatatttttaattatgtaaagcttaaacaaaaaggtaggtcaattttgacctaccttttttaggatttatttattagtattaagaagttattgaattaagtaagtagatattatttaaccagtttaattttcaaagtgagctagttattaattgcctgagcagatttttgagcatcccaccaatcgggtaaatcacacaataacttatttaatgtattattgcggtgcgaaattgagtttctctcattgagattcatttctgcaaaggtttttcctagttctggaactacgaataaagcatcgtaaccatagttactgctaccatgtggatacttagcaattaatccactgattctaccagcactaacaatatcattgctttcttgacctggccaagtaaagacaaaggtagtgtagtagctagctgtccttttttcactagaaactccacctaaatagcctaataatttagctttatcatcttgaccattatggtggtaaggcaagattcctaaagagttaagtagataatcaacacttagacctgagctttctgataatgtaggcaaattggtaaattcagctaaacgatgtgctgtagctctagcattacttaaaaatgttgcctcagaatatgacttttgtggtgcataatctacttcagctaaaccaactactttgataggaagactaagctggttaagtttatcttgtaattcattaattttattttggtcatatgttgtaaataataaactatccattattttccccatgctttcaaaaatagatataccatttatattgtatccgctttcatatactgcacagtcattgtcttatctttgtgaagtaaagtcaagcatagataatagcttttatcaaaaagtccatatacttcaggtttttaaactgaataatgttatttttaatgactaagattgtgaaaattatagaaactgtcaaatcttttgtgtaaatagatctttctcgtaaattgattttttaattatttatttaatcaaagtaggattctaaggtgtcctgaacctgaccaaagcctttatgaattcgattgaaataacggtcattgtagctcattgcctgaatgccaataaaagcatcaagcgactgttcagttggaaactctgccttaggcttagctttgcgcttgatcacattgttaaatgattcaatcatgttagtcgaataaattgaagctctgatctgcttgggatagttataaaagaccagcagatctggttctatgtctttcaagcttctgataacatggctgtaaaccttgccccatttggtatagaagtcatgcaggacagctgtggcttcttctttgtttgtctgttgatgcacctgtttgaattcgttcatgatcttttcacgatcgtcgacgcgtactttagcgcagatattgcgcatgacatgaaccaaacagcgttgaaaatgagctttaggataagtcctggccaaggctgttttcatgccaacaacaccatcagaaagaaaaagctcaacttgctttaagcctcgggatttcatgttttgaagcatatctgtccagacttcaatgttctcgctaggcgcaatgcggtagtcaatgacctccttgtgcctattaggcttgatgccaatggcaatatagactgcttcacgctcaaatgtttctcggcgcaaaggaaggtatgtcgcatccaaatagacgcagaaaaacttgtcgcttagcttgcgtttgtggtaagcctcaacctttggaatcatctgcttggaaatatttgatacctgagctggactgtaatggctgccatacatcttttcaattagatcggctatttccctggtggtcacgcccttggagtaaagcttgataatcatgctttccaagatatccgagtgctgcttgtagccaggcagcgtgtgctgatgaaattgaccgttgcgatcccgaggcacttgcacttcaattgggccaaattgcgtatcaactttgcggaaataagcaccatttctagagttgccagtattccagccatttctggcatagggatcatagcccagaaaggcagtcaattcagcttctaacaagttattaacagcctgttgtagctctttgcgcaataaatcatttattttgtctggattgaatagagcttgagcaaaatctttggtaaaatcattcatgaaggagttcttctttctgtatgtgtttttttgttcaaaccaatcatacgagaaaggaactcctttttctaatgtttaaagaaataaatttaaggaatcattcatccttacacaaactattttacagtctcaaattataatatgaattcatttcaatttatattacttttatatttataacaatcttgtataaccttttgatatataatttctctgaggttgtttttttatatgaaaaaatgaaatacatttatcacactaaacttgtatcaaattacacaagatagagtgattaatcaattaataaaaaaataaaattgtattttaataaaaaagagaaaatcttttttagattttctcaattatgattaactagctattaaaaatttccataatgcattattggtgtaccagttttgcggttgaattgctcctagacaggctacaataatataaattgctaatgttgagattatgaatgcaatgcctaagttgacaatgttgaatggaaaggtagttttatgttgtttcattgcgatgtgaatggcgaaagccaacagaaccaaacctataataattccaaattgataataaatgctcattttctctcctaagttacagttaaaagtatacgttaaaatcggattaaagagtgatttttatttatctagcctctttattttatcaaaatcaatgttatattagagaggtagaaagaagattatgtacatatgtctgtagatatttacaatgaaaaacttgaaccatacgacgatggtaagcgtcataaatttagtggtacttttgatagattaaacgatcgcttagctatttttaaggatttgcgtattgcaggtgctggtggcaatccaattgttaagcagttagcactgcattacttgaaaactttcaaagaccttgatttgaagaggggcgatgtagttgaatttgaaggcatggttgaaaaagattctaacaatggcttcacaattgaacgcccaactcaagcagaaaaaatcagatcagcagctgccgatgatgctaaagttgacgtggttggcgatgattggaattggtttgaaaattagttaacggaagtgacttacgagatgtaagccgcttttatttttgaaatttaagtcatagctagaaatgtagtaaaattaagcttgtaaggagaattagatgcactttgatatctttaatcgaaaaactgtctcaactgataaaatgtttttccagacaacattaaatcctaagcaagcaataatcattggcaatggtgctaaatttcgacgttgggttttcttttctactaattttgctacattttatgtaatcattctgtcagctattagtattttattaattaagtctaatgtttctgtactaatttgcttactattagcattagcaaatttagtaattaatcgctcaatacctcgttattggcaaactttctttggcccgaatgctgaatatggaaaaaatcatcgtccagctattttgcctattttatatatcataaccttgttcggttggctttggagcgtatcacatttcgtaggatctttaacttttattactggtacatttgtgctagtaggtcttgcaggtagtttgttatcgctctggatatggatgaatttgaatactgttagttgtgctccaatcagtgaattacaatggcgaaacaatgccaaacgcaggggaatgtctgatgaagacattgataaggttattgctagtttaaaaaagcgtagagcaatatattttagtaaacacgataaataaaattatagacgaaagatagaatttaatgacagattttacagaatttgaaagtacaattttttcatcagacgataattttgccattcgaaaaattaaacataatgtcattttgacgtattgcactcaagatggtgaaaaagaatatgaaagcctaagtaagaatacatatcgtgtattttttgaaaataatcttgaagttagtcgactgtatccacctgatgaattcagtcacaattggctaatccaaattttaatgccgcaactttcaattgattcgctcaaatctatggcgattgccttaactacattagaaagaattgcgcaaagtcaagaaggcatgcaattatctgaatatgttaaaaatagtgagttagtagaaataaagtcctggtttgatctgcgtaataagttgcgaaaaatatccaaagcttatagcctaattaagcaaagtactgatcaaacaacacagtggctaggaagtgatggacatcgttatcgtgaagtgattttagccaatagtttacggcttaattatggtcaagatgaagttgttcgtttaattccaattaaaaataattgggttattcagtttgttaaaactgatttcagtgcaactgatggcgtaattgatcagctttttgcggcattaacattattgactcaatatgtaaaacaaatttaaatcagagatgaaacatattctttatgcccttaatgggacttttttaatgttactcgttccggctttatttgtattagcattacgacaattaagccatgaagctaaccaaaaattggtaaatacatttggttttaatagtcaaattattgttggcggattaggaattattgttcatgaacttagtcatttgattatggctataatttttggtcatcatattaatgcggttagtttattgcgcatccctagtaataccaatgatatgtcacttggctatgttaaacatacttggtctcctacatctacttatcaaaaggtgggtaatgcttttattggcattgcacctgtattaggatgcaccttgctgatttacataatcatgcgtacattgaatacacctatttcattggttcagaatcagcttactactcagttattaagtaatggtaatgcacttaactggaatttcttaactcatagttggatttatatttttgaattatttcagcttaattttgattcaatatggcactcaattgttgctttattgctagtaatcagtctatgttttggtggattcgatttaagcgaggctgatataagtagtggcaaatatgcttttttaggattaattggtataacctttattatgcttctcttagtttcttttctaggctttcacgctgcattattaccgtttttagttaatattactgtctggatttatttggtattcattatatcaatagtgattttagcaataattaatttaattatgtatattttaaatattattttataaaggagaaaataatggcaaaagcgttattagttatcgactatagtaaagactttgtagctgatgatggagctcttacttgtggccagcctgctcaagcaattgatcaacgtattacagaactgtgtaaacagtttctacaaaataaagattgggtgattttcccgatggacgcgcacttaaaaaatgatccatatcaccctgaaactaaattatatccaccgcataatattattggaactgctggccgtgaagtatatggtcaaacgggtaaatggtatttagaaaacaaagataatgatcatgttttattaatggataaaaatcgttattcagcttttcaaaatactaatctagataattatttacgtgaacgccatattcatgacctgacactaactggtgtttgtactgatatttgtgtattgcacacagcgattgcggcatataatttagactatgaaattacaattccacgttctgctgttgctacttttacatcaaatggcgatgaatgggcaatggctcactttaaaaatgcattaggtgcgaatattgctgattaatttaatggcctgcataatttactagtaagtccaattattactatctaataaaaatatacattataattaatgtaaaggaaaaagctatgtaaagtgaagaggtcaaaatgtatacaaatattcgtaaatttaaaaagggcggaaactacccggaacagcaaaatgggctaccacaagcattttttcataatcccaagtataagaagttaagccccgatgcatgatacctatacatgatacttacgatgagaatgattgattcacaaaccaatggatgggtagatgctgacggtaatatgtatattatttattctaatcaagagctaatggatgacatgcattgcaattcttatacggtgaaacgactaaagaaagaattggttaatcatgatttgttactcgaagaagatgctcctgcagaacatgatgataggttatatcctttaagaattaatgaaaacgaaaaatgataaaagacattggtaaatacggcaatgtcattaagttaagacattgacaaattatcgacttggacttttaagatcattcatttgcgatttatcgcatttgaatgctcttttttcatgccaaataaacccaaatcttgtttagaaattaggctacacgatataaataatatacagctgatttgggtttgagatttcttttgtcttttcgtcctggtctgatcggaattgtgtaatgactaatttgaataagaatctttttaaagatttcagttgaagaagaaattatatacatagcctggatgacaaaacatgactgtttgaaattgatcgcatattgatacttgcattttttttgtggtacatatgcttgagcatcaatttgactgactgcgttaaacataatcatgtgggcatagatctccatttcaataaatctatcctgcttggaatgaaactgtacgctacctaaagcatatttcaactttttgaatgaagtttcaatgccccagcgcaaatggtagatttctttgatcctttttaagggataatcggctctatttagattagttagaacaacttcccattcttctttgcctgatttaggatcattaattctaaatttacaggcacgaaattttattgtacataactctccaaagtcccagctgccatctttggtatttttagaccgatattttatatattgacggtaatgatggttaaccaaatgaacgttttctgtagccttatgggtttcataataataattagaggtagtcacccagcaagctatatccttatcacactcttgattaggcaactcagctacttccttaaatgcgccatatcccgttttagtacgtatgacataataacagttaggcaggcgattacaattttcaatcatgttaaagccggtataacctcgatccatagtaactatatatggtccgcaatttagctttttaagcatttgaacggcggctttacgttcatccatctttgacttaggctgaaagatgcagtcttgataagtattatttaacaggtcatagagtgcattaacatgaatttggcaatatggctttcctttatgattgagatttccaacgatattctctgatttaggattccagatttgattaaaatcagacccatcaatggcaaatatacgatatttatgatcaaataactggatattaaataaattctgattaaatacagttagaatatgcttaaaacatgcgggtgaaagctgacctttgcgttggacataagcggaagtactgactactttatcgttatttttaatagctttttggccaaaagctctaaacaactcactggtcaaatcttttccttgcatattaatagtagttttaatgactgtagctgcatctaaaaaccgcttcctagtgaaggcatgaggatcatcgataaaatcatgaatatgctttccagtatcattgataatttgatcaagacgatctaaaatatttctgtgaagggctttcataattaacaccagctttctggcaataattttgaaggtttaataatttaatcagagggcgaaaaggtaggttcttttcgcctttattttatgcaaaaaaagaaccaaatcataatgattcggttctacagagattagattcaatttgtcaatgtcttaacttaatgacattggtaaatacggccaatgtcttttatttagtattagtaaagaaaataactaatgtatccgcatcaggataaggctctgaatgaacacttaagaaattttgcagtttatgattgtattcaatattattttcactttgactattttgataaatttgctctagccagctcggttagccggataaatagcattgttcatggcggaacctacagcgttactttgaacgtcatttagtaaatatgatgtcccaatttgattaatttgattgagtaaatgatctatgcgttctatttcctgcttcttatcatgtacgtttggcacaagcagtagagagacggctgtaatatccatttcacattgtgcccaaaatttatcataaagcttgctaaagttttgatctgattgagctaaaagccattcctggtagatttttaaaatacgaattgttttttgaatatcatataaataaagcttacgataactaaactgctgaaattttcttgtaattccagaaagtagttctgtatagcaatctaagtcttcagcaattttaattgccgagtcatttttatttcctttctgtattttatttacattagctgatacttatataagtctatatgataatactgtactttctatacttttattataagatcatcgcatgatttgttaataataaaatgctcactaaaaatgttgtgacaatttattattaacaactaaaaaattatgatagtgtaagtagtaataattatgaaagagcgtgatgtaaatgtctagatggcatagattatttcctgaacgagtttttgatcgtggagaaatatattatggcaatgatatggttgaaaatattcaattagctcaagatcaggaacactttaccgctcaagttcaaggcggaatgggtcgttcttatactgtaactggtcgtcttcgtttagatggtcgagcttcagagttagactgtaattgtccatgggctaataaagggcatcgctgtaaacacgaggttgcggctttacttgcagtagaaaacgaacaagaaaatgaacataacgttaaagtcccttttgctgacttaatttctgaacatcttaagcaaatgattgcacataaaagcccagtacttaaccccttaaatttgattggcaatatgaaatttaccaaaaaaagttatgatcaggcactggaacttaatgatcactggtcgattagtagttgtcggcattttgatgataagatgcgtaaatatgaatatttttgggagatagtaacagaggacaatgagttaattacattatctgtgcaatttactcgctggcaaattatatcaattaaatttgatagtgatttttcccgtattgaaaaagatagtgttagaatattagctctgttttactttattaatgagtatcttgatgacgatccatttgatttaactaaccaggccgctgaagatctacttgaattttatagtgacgcttctacccaaaatgatgagccgattattttgcgggcaagtattgataagtataataacatccctagtttgacgtttaaattaggaaagaacaagcatctttataaagttaaagatcttaatcaactagtagatgcatcccgacacagctcttctctaaagctaggtaagtttttcaacgagcctataaatcaggctaaaatggatattgatagtcaacactggttatcttttattgaaaaaattatagatgctcgtaatctaaacgaagaattttattataattacagtagtcaggttggtcgcattacactagagaactctgtggccgatgaagttaatgatttactttatcaaggcataaagttgtactcaaatgagcagcctataggatatacaactgatcaactagatttaaacattaaaattgaaactcaaaagtcatctgctttagttagtgtagaggatcttccagtttctactataattactgggagtcatgcgtattatggctattacaaagatgtatggatcaaatatataggtcttacgcctgcttctttgcataatttaggattgcagcctggtgctgaaatgcaatttagtaaaaagaccgttgctaagtttgcacataatattttgcctaaatttgagcaaacaaagtttatattagtgtctggtactgatgaattgaaagctattttgccaccagaggcccattttttgtttaaattagattatcgtgtaggcagtattttatgtgtggctcgagtacagtatggggatgcacaatacgagttaaatcaaggatatactgaagaggaccgacgcgatgttgaaaaagagaccgcagcatggaagcacattaatacatattttagtgattatcagcatgggcggtatgttttatccaatgaagactcggatgtcgtacaagcttttctagatgatggtatcaatgagttgaaacgattaggcgaagtacaaattacagctaactttagatcacttttaaagggaataaagattaatttggatgttggagtaggtatcaacctgactaatgaattattagatatcgatcttgctgatcaaaagatgagctgggaagacattcaagcggctttgaaagcctaccaagaaaagcgaaaatattttgttttaaaaaatggaatgctagctaaggcagaacaaccgacaattgaacaattggcacaaactttgcatgatttaggtattagttttaaggatttcattcacggtaaattacatttaccagcatatcgtgccttttattttgctaagcaaatgaaagctgctaatgcactgcatttctcaactaatgaatcctttaatactctgattaatgatttagctaagaatcagttgaagcaaaatcaaataccagttagtttgcaaaatattttgcgtccatatcagaagataggttttaattggctaagcactatcgttaattataaatttggcgggctacttgctgatgagatgggattaggtaaaaccttgcagattattagtcttcttttagctcgcaaagaaaaaatgcaaaatcagttacctagcttaatcgttgcgcctgcttctgttatctataattggcaggcagaagttaaaaagttcgcacctagccttaatgtggctctattagatggcactaaaaaagaacgagagagattgcttttagatgctaaaaagtataatctgctaatcagttcatatcaatcgcttaatcgagatctagaagcgtaccaaaatctaatttttgatgtagaagtaattgatgaagcacaaaatattaagaatcagcaatcagttaccgccaagacagtcaaagtcattaaagcgcatcataaactggctctaacaggaacaccgattgaaaataaattgagcgagttatggagtatttttgattacttaatgccaggttttttaggtttatatcctgactttaggaaaaagtatgaattaccgattgttaaagagcaagataaagaagcagaagatcaattagctaatatgataataccctttatcttgcggcgtctaaaaaaagatgtgctacgtgacttacctgacaaagatgaagaaattgtgcctgttaaaatgaataagaaacaagctgatttgtataatatgcagacgcaaaagattatcgctcaattaaatggacagggggatgaagactttaagagatcacgttttcaaattttggctcagattactaaattacgtgaaatttgttgtgatcctcatttgctttatgaaaactatcacggcaagtctaataaattaattgctacaattgagttgattaagaataatctagcaaatggacataaaattttattgttttcacagttcacagctatgctagatattttgcatgaaaaccttgccagattaagactacctttatttactattactggatcaacacctaaaactaagcgtcaagaacaagttcaaaagtttaatcaaatggctcaaccaggggtctttttgatttcattaaaagcaggcggaacaggcattaacttgactggtgctgatgttgtaattcattatgatccttggtggaacttggctgcagaaaaacaggcgacggatcgagctcatagaattggtcaaaagcattctgttaagatttataagatggttacagaagacagtattgaagagagaatcattgctttacagcaaaagaaagcagaattagctgatataattttgcaaaatgatcagattgctgatgcaacaatgagtaaagacgatttaattaagattttgaaataaatagatcattataataaaataaaaatatttgtttgtacttgcgaactattgtttgcaaaagtataatatttaggtaaacaaaaaccaacaagctaaatgcttgctggttttataattttagtttgagttagtatgtttctttttataccaatacactagaccgaatggaaccagattctcttggtgatgttcgattcgaataatattgcttcggtgactccagtaaattaagattacgagcaatccactgataatgctcaaggcaagatcgtggaaaaagaatgaagcaataaagattagaactactgagatcaaactagttaatgaaaccatacttgtaataaataagatagggaagaagattaacgcacagatcaagaaaaaatggacattatatcctagtaaaaatccagcggaagttgctactgccttgcctcctttgaactttaaaaagacaggaaaagcgtggcctaaaattgcagctaagccaaaaatcaagcaaagataatgtggtcctagtttaaaaattattggtaatactgtagcaaaagttcctttgagaaaatctactataaagacaatgattccagcagctggtcctaatactctaaaggtattagtcgttccgatatttccagatccgtatttcctaatatctttatgaaaaaagatattacccactaacacacctgttgggaatgatccaatcaagtatgctaaaataaacaacgatgcaaattttaatgcaaacatatttaacaacactcctattaatctatcgctattttagcaaagattatcttttaaatatatggtgctggttaaattaatgaacaagtggaggaattttagtggcaaaagctaatacttatgatgattcttcaattcaaattttacatggcctagaagccgttcgtaaaagacctggtatgtatattggttcaactgatattcatggtcttaatcaattagtgtatgaaatcgtcgataactctgtcgacgaagccatggctggttttggtaaagaaattgatgtaatcattcattcagataatagtgttactgtaagagactttgggcgtggtatgccgacaggaatgcacaaatcgggtaagcccacaattgaagttattttaactgtattacatgctggtggtaagtttactgaacaaaattataaaacttcaggcgggttgcatggcgtaggttcatccgttgttaatgcactttcaagttatatgaaggttagagtcgttcgcgatggtaaagcttatgaagaagaatttaaagatggtgggcatccggtaggtacattaaagtgtgtaggaaagacaaaagagccaacagggactaccattacgtttaagccagatgagactatcttttcaaccacgaagtataagtatgagacaattcaggagagaattcgtgaatatgcttttctacttaaaggggttaaatttttcttaacagatgagcgtgagccagaacatcatgatgtttttcagtatgatgatggaattaaatcatttgttaagtatttaaacgaaggtaaaggcacaattagtgatgtcttttattttgaaggcaagcaagatggcatggaaattgaattttcaggtcaatatagtgatggatattcagaaaatttagtttcatttgttaacaatgttagaactggtgatggtggtacccatgagtcaggtgctcgtagtggatttacacgtgcatttaacgattatgctaaaaagcagggtctactaggtaaaaaagataaaaatattgatggttctgattatcgtgaagggcttagcgcggttttatctgttaaaatccctgaagaattacttgaatttgaaggacagactaagggtaaattaggtactccacaagcacgttctgctgtagattcacttgtttatgagaaaatgtcttactatttaatggaaaatggtgagctggctcaggaactagttaagaaggctcaaagggctagggatgcacgtgaagctgctaaaaaggcacgtgatgaaagcaggaatggtaaaaagagacgaaaaaaagaagttttgtctggtaaattaacgccagctcaatcgcgaaatcctaaaaagaatgaactattcttggtcgaaggtgattcagctggtggatctgctaagcaaggtagagacagaagatttcaagcaattttgcctcttcgtggtaaagtattaaatactcaaaaggcaaaattgcaggatatctttaaaaacgaagaaattaataccatgatttataccattggtgctggtgtaggaaccgagtttaatgttgatgactctaattatgataaagtcattatcatgactgacgccgacgatgatggtgctcacattcagatcttgctattaacattcttttatcgttatatgcggccgatgattgaacacggaaaagtttatattgctctgccaccgctttatcgcttacaaaaaggtcgaggcaaaaagacgcaagttcaatatgcatggactgatgaagaactagctgatgatgaaaagaaaatgggacgtggctattcgctgcagcgattcaaaggtttaggtgaaatgaacgcggaacagctatgggctactactatggatcctcaatcgagaatgttaatcagagttaaaattgacgatgctgctcttgctgagagacgagttactaccttaatgggtgataaagtagccgcaagaagaaagtggattgaagaaaatgttaaattcagaatgggcgaagacggctcaattctagaatccgaagatgaataaaagaaggttttaaatttaatggccacaaaagaacgaattcgagaaatgccacttgaacaagtaatgggtgaacgttttggacgatattcaaaatatattattcaagaacgtgctttgcctgatattcgagatggcttaaagccagttcagcggcgtatcctttatgcaatgtatcaagatagtaatacttatgataaaccatttaaaaaggctgctaaggctgtcggtaatatcatgggtaactttcaccctcacggtgacagctcaatctatggggctttagtgcacttatcacaagactggaagatgcgcgaaccgttagttgaaatgcatggtaacaatggttcaatggatggtgatggcccagcagctatgcgttatacggaatcccgcttaagcaaaatctctaatatgcttttgcaagatattgataagcaaaccgtaaacatggtgcttaactttgacgatactgagtatgaacctacagtcttacctgcacgctttcctaacttattagttaatggatcaactgggatctcatctggttacgctacagagattccaccacataacttaggtgaagtgattgatgcaacaatttatttattgaaacatcctgatgcttctcttgaagatttgatgaaatatgtaaaaggccctgactttccaactggtgctattgttatggggactaagggaattaaggaagcatataagacaggacgtggtagaattcaagtccgtgccaaaaccactattcaagaaattcgtgggcataggcaagaaattgttgctacggaaattccattcgatgttaacaaagcactattagtaaaaaagatagatgaaatccgtctgaataaagaaattgatggaatcgcagaagttcgtgatgaaactgaccgccatggtttgtcaattgtgattgaattgaaaaaagatgctgatgcgcagaatattttaaattatttatttaaaaatactgacttacaagtatcttataacttcaacatggtcgctattgatcacatgactcctgttcaagttgggctaaaacgaattttagcttcttatttagaacatgaagaagacgttgtaactaaacgtacgaaatttgacttagataaggcagaagctagattagagattattcagggcttgattcatgccatggatattttggatcaagtaattaaaaccatccgcgcttctaaaaataaagccgatgctaagaagaatttaatagctaagtataataaatttactgaaaaacaagctgaagcaattgtttctttacaactttatcgtttaactaatacggatgttaatgaattaattgctgaacaagacaagttaaataaattggccgaaaaataccgtaaattattatcagatcgtgcaactttagaaaaagaaattattaaagagttaaatgcagtcaagaaagaatttgctaatccacgtcgaactcaaatttcagaagaaagtgctaaagttgaaattgatgaaaaagccttagttgctgatgaacaggttagagtactaattagtcgagatggctatttaaagcgttcatctttacgttcatatcagtcaactaatgatgatgacaatggtttaccagatggtgacaaagtagtttatgaaaacacactatctaccctgactaacttgtatttatttaccaataaggggaatgtcatttatcgtccagtacatgaactaattgaaaccaaatggaaagaaacaggacaacacctatcacaagaaattggattagacagtgatgagcaaattattcgcgtctttgtatttgataaattgaatactgattgcaactttattctggctactaatgacggttatatcaaacaattggagttagctaacttacagccgacgagaacttataagtcacgtgcaatgacagctatcaagttaaagggcaaggatagttatgtagttggggtagatttgatcaaatcagataatcataaggaaatcacattatttactcatcgcgcctatgcaattagatatgatgttagcgagataccaacttcaggagctaaagcagtaggtgttaaatctgctaacttgaaagatgacgattatatcgtaaattatgtcctagttgattctaagtatgttgatttaatgcatgttgggctaattactcaacgtggggcatttaagcaattcaaacttaaactagttaataaagtttctagagccaagcgaggggtactagtactgcgggaattgaagaataaaccgcatagaattgttgctctaatgccatatgctcaagatcatttgttacatgtcactacttctagtgaccgtcatgtaaatattaaaactacggattatccattaggcgatcgttattctaacggctcatttgttattgatactactgttgatgggacgcctgtaagtattgaattgggaagacccattagtagtcaaaattaagatttgagtttaactaaaacaatatattaatctttaaaaacagtgttaagacatatgttttgacactgttttgttttggatagataatagcagtgttatgggacatggcttatcgtaaaataatattttaggaaagagataatcgttatgtctaaaagtgatactattttatcggctaaatcattgcgttattttttacaattgattgagacgatgaattatacccaagctgcacaaattttaggtattacccaaccggctttaactcagcaagtaaaaaaattggaacgcgctattggtgctccattatttggacaaatggggaagaagttatacctaaccgaagctggtaaagaaatggaagcagcagcgatagagttgctaaataccattaatggtgttattagtgacattcaagaatatacccagtcagataaaggcaatatttcaattggtattctagagtccgtacatgttgatcttttctaccaatttttacgttacttcaataaaaagtatccagaagtaacttttactgttgattactttgaccgcaaagagctatggcacagacttgattccaatatgattgatatggcgattatgtatatgccagatactactaataaaacaggagctaatttccgtcatcaatacaatcatcgtgatatttgccctgagcatattgttgtactgactcacaaggataatgtggaagcaggagggacatattctgttactcgttttggcaacagaaagtgggttgcatatccggagaattactacttatcaagattaatgcgacttaactttagtaaaaagattgatctcgttactccgtttaaaattgcatctactaaggaaatgatcaaaattgcagaaaatactgatcttgatacttatgtagatcagacttactatgaggcgcataaggatgagattaatttgactcctgtttatattaaaaatatgcctgagtttacgactgcttgtgtttatcgtagaggaaaattagatgttcctaggatgaagaaattactaacggaattacagattttcttagacaataacttggataggaaccataattttagtaaactattaagtgaagaaattaaataaaataattagaaaaagaggcaatttatttaatggaaaaagaatttgtttttggacaccaaaatccagatactgatgcaattggcactgctattgcattttcatatttgcaaaacaagttaggttacaacactgaagccgttgccttgggtgagcctaatgatgaaactgcatatgctcttaaaaaattcggctttaaagcacctcgtgtaattaaagaagctgctccagaagttaaatctgttatgttggttgaccacaatgaaccacaacaaagtgtttcagatattgacaaagttaaggttactcatgttgtggatcaccatagaataatgaattttaataccgctgatccattatattaccgtgcagaacctgtaggctgtacttcaaccattgtttggagaatgttcaatgaatttggcattgaaattccagaaaactacgctggtttaatgctttcagctattatttcagatactttacttcttaaatcaccaactactacagataaggataaaaaggctgtagaagcattggctaagattgctggcgtagattacaaggaatacggcttagcaatgcttaaggctggtactaacatcagtgacaagtcagaagaagaattgattgatttagatgccaagagctttgaattaaatggtcacaacgtccgtgttgcacaaatcaatgttgttgacttacctgaagcgttagaacgtaaggaagcctttttaaaggcaatggatgcttcatctaaggataatggctatgatatgtttatgcttttaattactaacattcttgactcagattcagaagctttagttgttggctctgatgagactaagtcattattcgaaaaagcatttaataagcaacttagtgattcagaagttgaattacctggtgtagtatcacgtaagaagcaggttgttccacctcttactgatgcttttaatgcttaaaagtaatgatgtaaaaaataggaggtagggttaaccgcctcttattttttacctaaaaattaaaactgattttaggagaaaaatattgaaatacccacaattaaatttagaaaatcaacagggaccaacagctgtattgaaaaccaatcaaggtgaaataaaaattcaactttttccagaacaagccccaatgacggttgaaaattttattcgtttagctcaaaaaggctattatgatggtactatttttcaccgcgtaattagcgattttatgattcaaggtggagatcctgaaggaaatgtcactggtggtgaaagcatttgggggcatccatttgaagatgaactttcacgagaactttttaatattcgcggagcattatcgatggctaattcaggccctaacactaatggtagtcaattttttatcgttcaaaacaagaatatgcctaagcgttacataaaacagatggaacccgcaggctatccaaaggaaattattcatgcttataagcaaggcggaactccatggcttgacggtcgtcatacggtctttggacaagtaattacaggcatggatgtagttgataaaattgctaagtcgaaaaaagataaaatggataaaccactagaagatataactattgattcgatccaagtccaaggatcaaagtttgatgactaacaaaaacgtgctattttttcggaataaacagcacgtttttgttaattattcatttcttttagaagggtgatcaaagacttacatacgcgttcagccttaggttctggtaattttcttaattcgttaataacttttttcatgaaaacgggtgtattgttatcatgaattttttcaggcttgatttttttagcacgataggcattgttaatgatatcgggtgtagtagtattcaaagctttggcaatagaatcaagcttctgaatactaatgttttggtccttagtcctttccacacgtgaaataaaatttacagaaagatcacttagctcagccaaatcttcctgtgttagtttctgttcacgtcttctacgagaaatttcttctcctaaattaatattcacaagcattcgatcctttcaagtaacttatagtctattatagcctatataaaattatgtaaaaaatgaatagactattttaatattctcaacatacacttatattaaataataagaaattatatttgtttacgcgtggtgctagttaataaaaaagtccaatcggattagactcaagttgtaacttaaattaaatagaaaagagtccgatctaattgaactatctcaagcttaatcgtttttctcaccatttacaagttagctttgctcggttaaatgtaatttgtcgttctttgtacaagctttgtgctcctgatgaattgaagcaccgtaaaaatgttgatcaggttaaaatttctgacagctccatcttagcgatgcttatttggcaaactgaaattggtatcgaatctcaaagaagattttgtaaattctttgtcggtttgtctcattctcgctttaatcgtcgggcacgaatgcttttgcctttaatgcgctgtatccgtcaagattggaatcaagaagtaaaaacagctggagaattcttaattattgacagtttcccagtttgtcagcctatccgcaactatcgcgtcaagatctttcgtggcatagctgatatcggctagaaagccactaaaaaaatctattattacggcttcaaggttcacgcgctagtaagcgatgatggctatgtacttgaactaaagcatcagtgcatgatgccaaagaaacgacagaattgatgattaatgctcatccaattaaccattatcttttaggcgatgaaggctacttaggaaaagacttaactgccgagttaaaaggtatgggctatgtcctttggacaccatatcgaagaaacatgaaaggcgctaaaaagcataacgatcatcaactgatggcaattagaagaacaattgagagcgacttttctttgcttagctggttttcagcagcggctagaaatagccattttagcttataatatggcatattgcctagaacgatttaactagcaccacgcgtatttgtttataaatgtacatttttagcgtaatcagtgctattaggcactacagtttagaaactgtcaaatcttttgtgtaaatagttctttctcgtaaattgattttttaattatttatttaatcaaagtaggattctaaggtgtcctgaacctgaccaaagcctttatgaattcgattgaaataacggtcattgtagctcattgcctgaatgccaataaaagcatcaagcgactgttcagttggaaactctgccttaggcttagctttgcgcttgatcacattgttaaatgattcaatcatgttagtcgaataaattgaagctctgatctgcttgggatagttataaaagaccagcagatctggttctatgtctttcaagcttctgataacatggctgtaaaccttgccccatttggtatagaagtcatgcaggacagctgtggcttcttctttgtttgtctgttgatgcacctgtttgaattcgttcatgatcttttcacgatcgtcgacgcgtactttagcgcagatattgcgcatgacatgaaccaaacagcgttgaaaatgagctttaggataagtcctggccaaggctgttttcatgccaacaacaccatcagaaagaaaaagctcaacttgctttaagcctcgggatttcatgttttgaagcatatctgtccagacttcaatgttctcgctaggtgcaatgcagtagtcaatgacctccttgtgcccattaggcttgatgccaatggcaatatagactgcttcacgctcaaatgtttctcggcgcaaaggaaggtatgtcgcatccaaatagacgcagaaaaacttgtcgcttagcttgcgtttgtggtaagcctcaacctttggaatcatctgcttggaaatatttgatacctgagctggactgtaatggctgccatacatcttttcaattagatcggctatttccctggtggtcacgcccttggagtaaagcttgataatcatgctttccaagatatccgagtgctgcttgtagtcaggcagcgtgtgctgatgaaattgaccgttgcgatcccgaggcacttgcacttcaattgggccaaattgcgtatcaactttgcggaaataagcaccatttctagagttgccagtattccagccatttctggcatagggatcatagcccagaaaggcagtcaattcagcttctagcaagttattaacagcctgttgtagctctttgcgcaataaatcatttattttgtctggattgaatagagcttgagcaaaatctttggtaaaatcattcatgaaggagttcttctttctgtatgtgttttttgttcaaaccaatcatacgagaaaggaactcctttttctaatgtttaaagaaataaatttaaggaatcattcatccttacacaaactattttacagtctcacagtttatagtatagtcttaaattgaatacttttattgttaaaatagaaatgaaataaaagctaaaaaaatatactaattattaagtttttaagcttataatgtatacaaggatataaaaatagattggggatttgatgagtttaaaagaggttttaaatagtaatcggcctgcagagtcacgacaattagcgtgtgcgttaactttttgtgggggatttattgatgcatatacatatatccagagaggacatacgctttccgctggacaaacaggaaacgttatcttttttagttcagcattagctgatcataatgttcctggaatgattaatcgagctagtacgtttattgctttttctttaggattgctattagtaggactttttcataaatatgtgaaaagtcactattggagagtattttgcttatttccaattttagcgatttgtattgtagtgggctttttgcctaaaagtgttcctaattattatattgtgcctgctattgcgtttggattggctattcaaaacgcatctttcagcaaaattgaaggcatgggttataacaatgcatttacaactggaaatttaaaaaaatcggttgttgcatggagtgcattttttttggtgaagacaaaagtaaacatacagctgccgttaattatatgatgttaacaattgcatttgcagttggagcaataatttcagctttactgcaaaaattattggtattaaaaactatttggattgcagtcatttttttaacgacgattaatttagtttatatcattgcattgagacgaaataaaaaaattgatttttcaaaatgattttaaaagcacttgtcataattggcaagtgtttttttgaagaggttgtgagtgagaagaaagcgaccaatctgaaaaataataattttataagtgtgcgtataattaatattatgtaaagccagattgaaaaacaatcaatttaataatagaagtcataattaatttaattgtttcagcaaataagtcttattttggatttgttaactcgaattcagagactgtaaaatattttgtgtaaggatgaatgattccttaaatttatttctttaaacattagaaaaaggagttcctttctcgtatgattggtttgaacaaaaaaacacatacagaaagaagaactccttcatgaatgattttaccaaagattttgctcaagctctattcaatccagacaaaataaatgatttattgcgcaaagagctacaacaggctgttaataacttgttagaagctgaattgaccgcctttctgggctatgatccctatgccagaaatggctggaatactggcaactctagaaatggtgcttatttccgcaaagttgatacgcaatttggcccaattgaagtgcaagtgccccgggatcgcaacggtcaatttcatcagcacacgctgcctgactacaagcagcactcggatatcttggaaagcatgattatcaagctttactccaagggcgtgaccaccagggaaatagccgatctaattgaaaagatgtatggcagccattacagtccagctcaggtatcaaatatttccaagcagatgattccaaaggttgaggcttaccacaaacgcaagctaagcgacaagtttttctgcgtctatttggatgcgacataccttcctttgcgccgagaaacatttgagcgtgaagcagtctatattgccattggcatcaagcctaatgggcacaaggaggtcattgactactgcattgcacctagcgagaacattgaagtctggacagatatgcttcaaaacatgaaatcccgaggcttaaagcaagttgagctttttctttctgatggtgttgttggcatgaaaacagccttggccaggacttatcctaaagctcattttcaacgctgtttggttcatgtcatgcgcaatatctgcgctaaagtacgcgtcgacgatcgtgaaaagatcatgaacgaattcaaacaggtgcatcaacagacaaacaaagaagaagccacagctgtcctgcatgacttctataccaaatggggcaaggtttacagccatgttatcagaagcttgaaagacatagaaccagatctgctggtcttttataactatcccaagcagatcagagcttcaatttattcgactaacatgattgaatcatttaacaatgtgatcaagcgcaaagctaagcctaaggcagagtttccaactgaacagtcgcttgatgcttttattggcattcaggcaatgagctacaatgaccgttatttcaatcgaattcataaaggctttggtcaggttcaggacaccttagaatcctactttgattaaataaataattaaaaaatcaatttacgagaaagaactatttacacaaaagatttgacagtttcctgaattgaataatatgctgacaataatcaataaaacaaccttcaaagagaagtattttgaaacaattatggtaaagtaattctaattaaaaacaatgaaaatagttgagtaatatttgctagttttgcctttagtatctataaagccattttttatttttatgctatagctttctttaaaacaaaaattttaatgatcgctagataaacctatctcgcaaaagcctaattttggtaaatttgtgcttttgttatttttattgttttaacgttttgtatttcattttaaattcgtaaaaaaatattttataaattctttgctctttttgctacatacaaatcggtattaagtgcttttatatttattcttattccctatttttaagatttgctgcaataatacacatattgaaatttcttaaataaataatcaagcggtaaaaatgataattctactaaactcatgactcaagtcgctacttaaatctgtgtttttacatgaataagacatctaaataaagtttcaatcttcaaaaaatgctgagaatcactctaagatttctttttaatgaattaatttatcgtggttactcaatctttatacaaacaagcaacattttaattcattattatacctctatctcccctcctctgctgaccagggaagacgaaaaaagagccgaaatcagacataattcgtccaatcaggctctttgcttatctagctagaataaaaatctgaataaactcaatctgttgcaggtctaattttattcataatgaaggcaacgacgattaccaagataactgcacctaaaattgacggtacaattgccatgtccgcaaccttcggtccccattcccctaaaagggcttggcctagtgaagatccaaccaatcctgctaaaatattagcaatccagttcattgacttaccatgtccagttaaagcacctgcaattaagccgattactccaccaacaattaatacccaaatccaatgtagcattttgatcacatttgctttcttgcaaaatatcttatcacatttctgattaaacaaagcgctttctttaactatctttattttgagactgtaaaatagtttgtgtaaggatgaatgattccttaaatttatttctttaaacattagaaaaaggagttcctttctcgtatgattggtttgaacaaaaaacacatacagaaagaagaactccttcatgaatgattttaccaaagattttgctcaagctctattcaatccagacaaaataaatgatttattgcgcaaagagctacaacaggctgttaataacttgttagaagctgaattgactgcctttctgggctatgatccctatgccagaaatggctggaatactggcaactctagaaatggtgcttatttccgcaaagttgatacgcaatttggcccaattgaagtgcaagtgcctcgggatcgcaacggtcaatttcatcagcacacgctgcctgactacaagcagcactcggatatcttggaaagcatgattatcaagctttactccaagggcgtgaccaccagggaaatagccgatctaattgaaaagatgtatggcagccattacagtccagctcaggtatcaaatatttccaagcagatgattccaaaggttgaggcttaccacaaacgcaagctaagcgacaagtttttctgcgtctatttggatgcgacataccttcctttgcgccgagaaacatttgagcgtgaagcagtctatattgccattggcatcaagcctaatgggcacaaggaggtcattgactactgcattgcacctagcgagaacattgaagtctggacagatatgcttcaaaacatgaaatcccgaggcttaaagcaagttgagctttttctttctgatggtgttgttggcatgaaaacagccttggccaggacttatcctaaagctcattttcaacgctgtttggttcatgtcatgcgcaatatctgcgctaaagtacgcgtcgacgatcgtgaaaagatcatgaacgaattcaaacaggtgcatcaacagacaaacaaagaagaagccacagctgtcctgcatgacttctataccaaatggggcaaggtttacagccatgttatcagaagcttgaaagacatagaaccagatctgctggtcttttataactatcccaagcagatcagagcttcaatttattcgactaacatgattgaatcatttaacaatgtgatcaagcgcaaagctaagcctaaggcagagtttccaactgaacagtcgcttgatgcttttattggcattcaggcaatgagctacaatgaccgttatttcaatcgaattcataaaggctttggtcaggttcaggacaccttagaatcctactttgattaaataaataattaaaaaatcaatttacgagaaagaactatttacacaaaagatttgacagtttctttattttaagcgaatgaactatttcttgtcacttttaaaatatattatttgactgtcttatacttttctttagatttggggcatatttcttgccacgactaattctttattttttgtctattgtatatctcaatttgatttcaatttttttcggtttgattactgatatattaataaatgatctcatctattgccttttgagaactatatctgtagtctataaagtataaattatgtgagagatatagataagattctctccactaagtatggaggacataaattgtttaaaaggaaatcaattattaaattagcatgtgcaactatgttaacgaatgcaggtgtcacacttttatctcaaatgactcgtttctctgactcagagagcattgtgcaagcttcatcaacatcagttgttgctaaagcccttggaattgatgttgccagctaccaaagcgcagatttaactgctcatgccaaggctggttctcaatttgcaatcgttaaagttagtgagggaaccagttatcgcaaccctaaggcagccaatcagattaaatctgctattgctaatgatatgatgccgatggcttatcattttgcaacttttagttcaagttcatcggccgctaagcgcgaagcgcaatacgcaatttcttctgctaaggcgttgggattaccagctggctcatacttagcctgcgattatgaaactggtcagggcaatatcattactaatggtaaaaatgtgacagctaaggctattattgcctttatggatcaaattaaggcggctggctatcaaccacttctctatgctagttcttccgttttgcaaaacaatattaatactccatctatcgtgaacaagtatcctaattcactctgggtagccgcatatgcgatttcaggccgagtagaccaacccaactttaaatacttcccttcaatggatggtgtcgcaatctggcagttcacagataattggcgcggaatgaatactgatggcaatattacagtcttgccattatcaatcgcaggtaacgcggcagtttcacaggctcctaaggcttccaataccaagaaaacagctacagttatgtacaagtcatatgtttatgacaaaaatagcaaccggacaaatgatttttataatgcttacagctctattgcttattatgacaataaggtgagaattaaaggcaaatcaatgattcgtgtcggtgaagacaagtatgtgatggcaagtaacgtactaggcaattcacgcgtctttaaagctgatgctaaagtgtataaaaatgatggcaccattaatacaaaatggtctactaaaaaatccggttcaccgatcaagacttatggccctaaacattacatcaataatgaagcttactatcgaattggtaaaaatgcttacgtcaaagcagacaagttctaatttatttttagcagcaaatatttgctgcttttttgatgcatccctaaaacgtaaatgaactgacaaatcatttccaatttatttatctgcatcccttttttatccatgttaaaattaaggcattatatagaaacgaggataagataaggatgaaatttaaaaagaagttagctttattcttaggtctgggagtattattgctttctctgactggttgtagtgattttcaaaactgggaattatctatgcgctctaagattggggcattgcccttaacagtatcaacgtatgattctaatggacaaaagatcgaccagatcaaagctaagtcagttaatattcatactgataaaaagatgtcacagaaaagtagtaatggcactgaacattctagcgtaattgatgttgactatggcaataatcgaatgattcacgttggttctactatgattgcctatgaaggactgaaaaactacgaggatgcatttaacaaaaaagttaagatcgacgatcaaaatcgttctgttcctctgttaaatacaatgtatcagaattttaaaaacgattggaatggtagctcaagagtagtaatgattagaagccaattaggaatgccgattgctgtctttattggaaatcacgtctcaattcataagagtgatatgaagaatgcaactcaatttgtgattgatggtcatcgtctatttgtttaccgtgctgattacacagtttatccaatgtccagtttaaaaagcaattaactataaaaagtgtcaatcctcattttaaggactgacactttttattatttatcatcaattaatgcattaaatgcttcattagtttcaacgatgtcgctcattacttgattaatccagtcattaagcttatcgttatcgtagttttctaaaccgccttcggaatctccaatgtccgcaataccattattgaaatctactagttcagtaattaacttttgagcaaaaatcttagtggtaccaccaaagtttttcgcaaaattatttacatccccatatgcatcggcaatatcactgaaaactgtgacagttttaccaaaagtctcactcaagttatctacatctgcttgagttggtacagtcaattcttcatcttcattattaagttgttcatctaaacgaacgccaatgtcgtttaacactaagtgaccatcatatagacgattcagtaatttgataccactagggtttttagcttggaagtttacactaatttcttctgtcatactttttcctcatctcacataatgtattttcatctattgtacaatttttagccaaaaaatacgactaaacaaggaaaataagcttttttcgattctttataaaaaatgttatattttacttgaacattagcaataaagagcataaaataaacgattgaaaagtgttgtaccatacaaacaacatatgtttgtaagtaatgtttgaattactaaatgtaatttgcccttacttactgacgagcaatcactgttgctataattagaatgctaagagttttctataagcgttgctggtattctagttatagtgacatgattatctaagttaaatttagttgcaatcatttttctacgttagtactatagatattcacgttcgaatgagcgcagtaattttaaattagactgttttttatcacctattcctgagaataggtgatttttttatgattaacgtatttgtatgatataatataaacattagttcgcaaaaggagtagatatggaaactgctaaatacctagaattgatccaaattgaagtaaataaattgcctgattttgttaagcaatttaatcttggtactaatcattcattaactactacttaccagtacttaactgaaattcgacgcttcttcgattggctacgtcaagaaaatatctcttctgcttcagataatgctcatgttactacggatacattagccaacttacgtcgcaatgacataatgctgtatattgattatttaggacatacccgtaataagcaaggccgactaaactcccccactacgattaatcgctcaattaatgctttacgctccctatttaagtttttaaccattactgccgacaataatcatggtgagccatattttgaacggaatgtaatgcttaaaattaattctttaaatgatacgcaaacacttaattatcgggctcatgtacttgaaagccacatgtacactggtaagttaaaatttgaatttttgacttttattgatcaggactatattaaccattgtaataagcaagcaaagattggttttaagcaaaacaaagaacgtgacatggcaattgctgcattaatcttaggtaccggcattcgggtgtctgaatgtgctggcgttgatttgagtgatttaaaccttaaggatgctgtactagatgtaactagaaaaggcggacaaaaagatagtgtaccaattgcagaatggacacttccttatatcaagcgatataaaggtattcgtaatgaacgctatcatgcagatagtaagcaagtggcattctttttaactcaatggcatggtcaaacgcggcgaattacaactaatgcaattgaaaaaatgatcaataagtattctgcagcttttggtcatccccttaccccacataagttacgtcatacggttgcttctgagctctatgaagtaactaaagatcaagtgcttgtagcacaacagctaggtcaaaaaggcacttcagccaccgatctatatactcatgttgatcagaaaaaacagcgtgcggctctcaatgagatctcaaaaaaaaatcacgattaatcaaattaaatgcaaaaacgagtttggctattcaattccaaactcgttttttattaatgtttcaatttcttgtaagcttttttggagccacgatctagatcacgattaaacttataatcttgccagtctttaacaaagagtaaatctaagttatatccttttgggtacaagtctttagctagtcgtcttaattgtaaacgtctgagtggtacttctacaaattcttttgtcacaaatatctttgctgcattttgggtaggaagatatttataaaagattccttcttcttttaaattggtagcatatacaatatcacctttatgaaattcttttttaacaaccaggttgcttttgtttttccgctggtgaacgaaacgtttttttaaagataaaggtaaattattgcccgctaatatggcttctgcttgatgcaaaacattttctggaatacctgattttttggcgatccatagtgctcgactattaccaatacttcctatctttaacttataagtaggttgcagattttttaagtcaaaatccattgcagctgtgataaaaccatcatgctgcttagcaaaatccttaatagagctgtagtgtgttgtggccatgattaaacagccacgtaaatacaactcttgtagaataccaatagcgagtgcgcttccttcatttggatctgtccctgtccctaattcatctaataatactaaactatggaattgagcatatttggtaatcatggcaatatctttcatttcggctgaaaaagtactcagagaattatctaggtcctggtgatcacctattaaagtaaaaacgtcatccattaatggaatatcacatggtttatcgctgggtaaaaacagacctagttcggtcattaaaatcatcaagccagtagttttaagcgcgacggttttaccaccagcatttggtcctgtaatcattagaacactattttcttgggttaattctaaggttaacggaacaggattaatgatcaagggatgccgcactgcacgtaaaacaagagaattttcacgattaattttaggcctaatacaattatatttttgtgcaaactttcccctagcaaaaatcatatctagtaaagtgattagttcaatgttacgcttaatatcatccttcacgtcgtatatttttgcagttaaagcacctaagattgctagttctagattacgtatttgtgcctttaaattggttatttgctgatttagacgaacaaccttagcaggttgaaagtagacggtttgtccaccattagaaacagccacaatagtccctgacaattgatttttgtagtttgctttaattggaatggtagcgtagccctctttttcaacgatcattgcgtctctaatcattttttgattaggtttactagtcaaaaaatgatttaatgcagttttgagttcagtaacagatttctttaagtcgcggcacatttttgctagttcacgatctgcctcatcgcgtacttgaccatgttcaatagtagtataaatagcatcttcaatgtctggcaatagcgtcatgtcttggacatatgcattgagtaatggtgctagctgctcatgtctggctaaaaagcgttgtagtaggcgatttactcgtaaaaattctgctactttttctagatcatcaggagttaagattagtcctttttcagctttagtaattaaatgctcgatatcctcagaactggcaaaaggaatgtgctgccgtaatttcaaaatcttcacggcttcttctgtttcattaagcagttgttctactttatgtaaattgctacttggttggacggaacttaattgttctttggcagcaatagtaattgcctgttgagctaagatatctttaacttgagtaaagtttaagttttgattattgttgatatttttcaatttgatgtaatttccttatgtttaatttaacgctgattgtaactaatggcttaataagtatgcttgcagacatatgcatttcctcgaatttctataatttgatttaaaaatgattgtaacataaaaagaacattaaaatatatactatagtaaaacagttattaaattaattcctatattttatgataaccatattactattgcctactatagcaattttgaaactgtcaaatcttttgtgtaaatagttctttctcgtaaattgattttttaattatttatttaatcaaagtaggattctaaggtgtcctgaacctgaccaaagcctttatgaattcgattgaaataacggtcattgtagctcattgcctgaatgccaataaaagcatcaagcgactgttcagttggaaactctgccttaggcttagctttgcgcttgatcacattgttaaatgattcaatcatgttagtcgaataaattgaagctctgatctgcttgggatagttataaaagaccagcagatctggttctatgtctttcaagcttctgataacatggctgtaaaccttgccccatttggtatagaagtcatgcaggacagctgtggcttcttctttgtttgtctgttgatgcacctgtttgaattcgttcatgatcttttcacgatcgtcgacgcgtactttagcgcagatattgcgcatgacatgaaccaaacagcgttgaaaatgagcttttggataagtctgagctaaggctgttttcatgccaacaacaccatcagaaagaaaaagctcaacttgctttaagcctcgggatttcatgttttgaagcatatctgtccagacttcaatgttctcgctaggcgcaatgcagtagtcaatgacctccttgtgcccattaggcttgatgccaatggcaatatagactgcttcacgctcaaatgtttctcggcgcaaaggaaggtatgtcgcatccaaatagacgcagaaaaacttgtcgcttagcttgcgtttgtggtaagcctcaacctttggaatcatctgcttggaaatatttgatacctgagctggactgtaatggctgccatacatcttttcaattagatcggctatttccctggtggtcacgcccttggagtaaagcttgataatcatgctttccaagatatccgagtgctgcttgtagtcaggcagcgtgtgctgatgaaattgaccgttgcgatcccgaggcacttgcacttcaattgggccaaattgcgtatcaactttgcggaaataagcaccatttctagagttgccagtatttcagccatttctggcatagggatcatagcccagaaaggcagtcaattcagcttctaacaagttattaacagcctgttgtagctctttgcgcaataaatcatttattttgtctggattgaatagagcttgagcaaaatctttggtaaaatcattcatgaaggagttcttctttctgtatgtgttttttttgttcaaaccaatcatacgagaaaggaactcctttttctaatgtttaaagaaataaatttaaggaatcattcatccttacacaaactattttacagtctcgcaattttactataacattcagcactagtatctcaactgtaatttttaattacaaatctattatcgtaaaaagggtaaacaaaaaagaccatagtttgtactatggtctatggctatttgttcttattttaattcgagcttatcaatatcaaccatccatgcaattgcaattgatttctctcctaagtgtgtagcgattactggactaaattcagctacatcaactggcttatctggaaagttttcattaacaaattgcttaatttgctccgcttgctttaaatcatttgagtgaaatacaaacaagcgtagcttatctttataaggcaaatttgctgtcttctctaaagttaatttttctaccttagaaacagcacgctttaatgatctgatcttatcaaaagcaacgatttttccttcatcattaaaagttaacaaaggcttgatttgaagcattgtcccaataaaagcaccggcattgcttaaacgaccaccacgacttaagtttttaagatcatctactacaaagaattcatcaattgtcttacgtatctcatctaacttctttaagatagcctctggttccataccattttttatcattcttgcggcagctaacaccaagtagccttgcaatctaactgtcatcttagaatcgtatggatataaattatattcaggattgttatgtgccatatttaccatattttgataaaagcctgagataccactggacaaagtgatagcgataatagcttcatagccttctccgtgtaatttattacataattctatcatttgccccatgctgggctgtgaagttttaggaaaagcagcaccttgtctctccatctcaaaaagctgggtggaagtgatattaacgccttctgaatattccttatcacctacgatgacaggaataggaactacattaatatcattatttttaacttcttgatcagttaagacactagtactgtcagtaactaatgcaattttcaatttattaacccttcccatatctaatttagcatagaaaaattatagcataaaaggcacctatcacgcaccctattccattttttctagggtcatagaagtatcagcgacttgatttaattgcttaataaataaattagcagcatctctgtcaaaatagacaaataataaattctcaatcttagtcagagttttttttagttctttagctttagtcacgccagcttcacttagattcacaatcttgcttgaatctttttccgatctagtgatattaataaagctcatagtcttcttttgctgcaattgacgacttaaggttgataatgaaatattaagcgcttctgccagcttccccatcgctaatgcttgatttttgttttcatcaaaaaatagcaaaattcgagtttgtgaaatatttaagccgcatttgtgatttatttcttttttcacttgatctgcgatcgtactaaaaaataatacatccattcgtatagtcctttttctccaatgtagattactatatacttgtattttatcatttaatatggcatttgataataccaaaaggctaatttatcagtaatattgtataatacaatgcactttttatgttgtaatatacaacttaatgatatagcagacctcgcgtgaaacatttactactgtattgcaggtttcaattatgattagctataacttataaatataatcattttagaatctgactaaaaattgatataatattacacgaactttgaggtgatatttatggcatttgatggattatttatccatagtttattaaaagacttagtccctactctggtaggtggtcgcttatcaaaaatttatcaaccatttgatcaagatctagtcttaatttttagaaaagatagaaagaattatcaatttttaatttcggccaatgcacaatatccaagaatgtatttgactaaacaaaacattgcaaatcctgataaagcacctatttttgtcatggttttaagaaaatacttagaaggttcagttttgcaatcgattgagcaagttggcttaggtcgaattgtcaactttcattttagtaatcgaaatgaacttggtgatcaagtcaagctcatgctttctgtagaattaatgggacgtcatagtaatgtcatcctttataatcaagaagacaatcacattattgatttacttaagcgaattaatcctgatgaaaatagagcgcgtgttttactgccaaaagcaaaatatgagttgcccccactaaaaccaggattaaatgggttgactctatcagaaagtgaatttaaacaattaagtagtgaaaaccagcctaatgaaattgctcaaaaaatggatggcttagataaagatgatcgaactgaattattaggctatcttgaagacgattacacttattcatcttttaagaccttttttaatcagtttgacaatccgcgtgcttttattttaaaaacacctagaaataagcgtaagattttttgttatttgccctatcatttagatttagagaaagaaagctctaatccagatctgaatgctggcttagatgaattttatgaatatcaggcaacacgtgattgggttaagcagcgtgcaggacaagttgaacgtgtagttaagaatgagcaaaataaactaactaagaaagttaaaaaacttgagaagcaattagatcttgctgaaaattcagagggctatagaattaaaggcgaaattttaaatgcaaatttggctcaagtaaaacctggaatgactaaagtttcattacctaactattacgaaaataatgctccattagagattaaattagatcctgctctctcccctgctcgtaatgcgcaaaagtattttactcgttacaaaaagttacgtgattctattaagcacattaatgaacagcttcgtattgctaaggatgatattcgttactttgattcaattcaaacagctattgacaatgcggatccacaggatattgatcaaattacagatgaattgattaatcaaggatatttacgtaaacaaaagaaaaataagcgtaggaagaaaatcattgaacgcaatttaaatgaatttaaactttcatctggtaaacacgtattggttggtaaaaacaactatcaaaacgattggcttactcttaaaaaagctaataaatctgattactggtttcatgttaagaatatgccaggctcacatgtgatcttacgcgatgatcagcctactgatcaagatattaaagaagcggctgagattgcagcttacttttctaaggctaaaaattccgctcacgtacaagttgattatgtgcaagacaagcgtgtgaaaaagcctaatggtgctaaaccaggatttgtaatctacactggacaaaattcaattgaagtaactcctgaagaaaaggaaattatgaataaaaaaattgaaaaataaaaatcatcgaactagttagttcaatgattctcataaatgcaaagtcatatcgactttgcattttgttttgcttattaaataggttgagtagttaaagccaatgattctagaacgtctaaaatcaattccgctgtttcgatacttgagaaaacaggaatatgtgtattcagcgcttcatctctgatgcgcgatgcatcttcgctagctgcatcagacaaattagtaatattaacaaccatgacgatcttatgttgacgaattttatctagtagatttctagggtctttatgaaccttctccactactccagtagtaatcccagcttccgcaaacatattagctgttccttcggtcgcaattaatttgaaacccaagcgatcaaatcggcgagctagttgggtcacgcgattcttgtcttcatctctgactgaaataaagattgttccataacttggaatatgtaaatcacttgcttcatatcctttgtataaagccttagctagttgagtatctcgacccattacagaacctgaggatttcatatttgaatcgaaagtattaccacttgaataattaagaaatgaaaatactggcattttaatatgaataaaatcgctgttttgccatagaccattaggatatcctagctctgctaaatttttgccaattaaagcttctgtagcacaagtagtgatatccttatctagtgattttgataaaaatgctacattatgacctgcatatggtttaatttgcaatagatataggtcattatcaacgaataaatagtgcagattaaaaataccttttgttttcagctgcttaattaatttaattgactcttgctcaatctttttttgctgctcttcggttaaattttgcggctgaatcactgcaattgaatcagaggcatgcgaacctgtttgctctagatgttcaattataccgggcaaagttacattggtaccatcagagatagccgttacctcatatttgtgtccctcaataaagcgagaaatagttatttgatcaagttgattttctgctaaatatttctctattgcaggaacatcataaacaactgcagatttttgcttgttttctttattcataccaccaattaaaagtggaaaaccatatttagaagcaaaagcgaaaacctggtctgtatcagttgttttatttaatgccgggacccgctttaaggtagtagattgttgatcaagcaaagtagtaatcttatcccgcggatcgtcgtttgccttttgcccaataacgtgcaaaccacatttttccaactctttactcaatgcactgattcttttgccagaaaattgaactaatacatcagaaatattttctcttttagcaacagttagaatattttcaactgtaatggaatcaaaataaactcggtcaatattcttataccttgatgaaatcgattcgtcattatttgatagaagcacagtaacatagccatacttatgtaaagtatcggccgcgtgagcaatcatatagtcaaactcgctagtaaccgaaacttgaagcggcaacatgcccaaaatcaagatctttttttcagcatttaaagcttgtgcttcattttgaacatcatatgcactgtagtaagcacaaacattaggtttatatatacctgctgagccgtcgatcttcaaatatgatggctgcaagtcaattttattaatcaaagagcgaacttcagtaactgatttttgtaaaatcttagctaataatgggttaaagaatccatagactttagcttcttgcagcaaatcacgcgaaggctgctccttctcttgtaataactttttgccaagtcttacaatgtgaagcaatttctgataataaaccggatgcaaatgtgttactttttgtaattcagaatatggaatatcttgatcaattgcggctaataatttaactaaatgcaattcatcaggatgtgccaaatcattcaaaatatctgcagtggatttttctttttcttttataaaagcatgccaacccaattctaaattaatagttgcatctaagcctttcagaaaagcagtttcaaaattacggcctacacccattgcttctccacttgcttgcatgcgacttcctagcaaatagtggttatagccggattcagcaaatgaccaatatggcattttaattgctactgcatctaaggtgggttcaattgaggcattaagtccagatagaggatcggtaatctcattcagtcgataaccgatagcaactttgctaacgacatatcccacatcatacattccaattctttgagcccaaacagaacttcgcgtcaaacgcggacgaatcgtcaaaagcttagatcgaatttgagttccatggtgtttaatcgcaaaatgaaaactagcaaatccaatgagatcaagattagacatgatttttctaacggttattcttaactcttgaatatgatcattgtttagggttaatgatggcatcacaactgcagagtcacctgaattaatacctacagcttcaatagatcccgcaaaattgataaaagctaaattgccatccttatcacggattacgtcaacaattacttcttcccaactagataagtcttcagttaagcgataattcttccatgtaaaattatcattttgcttttcttctttaaagtaactgattaaatcggtaggatttgcaaattgcaaatgttcgttgtgtacaaaacggttgtacttagtaactaatacgggaaaagtgactttgtcgttaatgctttctagcgcattatctaaattatcctgaatactctgattaagttcccaagattgcccggtatcaatatgtagcttagtaagcaactctgtctttttctgttgattccccatttgtagagcacgcgaattcaatgttagtaactgaattcccatttgttctaaaacgccatcttgtaataacttatgtgcaacctttaaaccattagttgaaccataagctgtcataattgcatctggctcttccatccgtagaattcttttcaggaagtcgagagtcatcggttcaagatagactgttacaccaagttttttatcagttgaaattgtagctggattaggattgactagcacaacttgaatgccttcttctgtcaaagcatcaattgcttctgttgccataagatccatttctgctacactaccgattaaagtagggcctgatccgataattaaaactttatctaaatcgttttctaatggcatataactaccccatcatctgtaaaaaataatcaaaaatttcatctgcatcattagtgcctggtgctccttcaggattaaaagcagtggcgatcaatttgtccttactgttccagaagcccgccatcagttcactgtgtagatcaaagtattcacgattcatattcatcttcacactatcaggcaacactagttggtcaatattcatcgctgtttgccagatagcattactattttgttcaatcactggataattaataccatcaaattcttgtggtaattgaaccagttcaaagccgagataatcgctcaaagttaaaaaacctaatccgattcctaaaattggatacttaccataaaaatgatctaaaactggcgttagctgattaattacttcttctggttttcctggcccatttgaaataatcattccttcaggacgtaagttttcaatatcaatcggactggcactgtatggtaaaactgtcgtatttacttttcgtaaagataaagcacgcagcattgagtgctttagcccaagatctagcacagctacagttcgtccaacattaggggatgcatatgcattcttagttgaaacagtcgcagatttatttttaggtaaaactagtgctttaatctgatcaaaggcatgctcgtcattagtatccatgatcgaagccttaattgtaccttcttccattaagcgatgaactaaagcacgagtgtcaactttgaaaattgcagggatgttcttttctttcaaaaaagaacttaaatcttcaaaattttcactatctgaaatatttaatgcaatatcgttagcaataatccctttaactacgggatcaatactttcataatcaatggcattaataccgttattaccaatcattggtgaagtaaagactaaaattttaccagcattagtaggatctgttaatgcttcttggtagccaaaattagccgtttgaattgctaattcaccggttgaaataatactggcaccaattccttcacctggaaatgaactgccatcttctaaaatcaaataccgtttcatattatcacttacttgtttgttctagttgagccaacgtttcttgaaaaatttgtggtggttctacactaaactctagccattcgccagtacttggatgtttaaatcctaatactttagcatgcaaaaattgaccatgacctttcaaggttttacgtggaccgtataatgggtctcctgcaaccggatgtccaatatagtcaagatgaactctaatttgatgggttcttccagtttcaagctgacactcaattaagctataatccttgaactgctcaagcaccttgaagtgagtaatagcttttttgcctgtttcaactaccgccattttcttgcggtcatatggattgcgaccaattggtgcatcaattaccccattttcttccgcaaaattaccatgaacaattgcccaataaagacgtttgttagtcttatgagccaattgatcttctaatgattcacgagccttggcggtcttagcgatcattaataaaccagatgtatctttatcaatccggtggacaattccaggacgaaatccttctggtgattgtgctaaggccttggtgtgatataacaacgcatttactaaagtatgatctggatgacctggtgcgggatgcactaccataccttgaggcttgttaactacaatgacatcatcgtcttcatacacgatatcaagtggaatattttcgggtataacatctaacggtttaaccgctggaatattaacttcgattttatctcccgcctgaatcttataagatactttttcgactttgccattaactaggatattttggtctttaaccagttctttaactctagttcgagatagatcaggaatttgttctgaaacaaacttatctaaacgtcccttttcgttttttacttcaagtgaatattctttagtcatgttgttcttccttaccttcaataaaaattaagtaaatgaacacaaggattactccaacagtaattgcggaatccgcaatattaaaaatgttgaagtgaacaaaatcaagctgaagcatatcaactacatattttaaatgcaaacgatcaataaaattaccaacaattccacctaagatgagggctaaacccacatcaaacaaggtattcttgtactttttgttaaaaagaaaatacaagcaaacactaatggcaataatactgataatgtaaaaaagccacatttgaccagttaaaatgttccaggccgcaccattattttgcaaataattaaaggaaagaagcccaggaataatctggtgtacttctcccacagcataatgggcaacaatataattcttaagtccttgatcggcaagaaccacaactaatgaaataattaaatataaaaactgcatatctttttagaataatccgctaattttaccattgttatcaacatcgatatctagggccgcaggatgcttaggcaaacctggcatatctagcacatgacctgtggtaaccacgataaaatgcgcaccattttttaaactaatccctttcacatgaagcttaaagtcagttggagcacccaattcgttcttgttgtcgctaaatgaatattgggtcttggcaataattactggtaattgggccttacctaactttcttaattccgcaatttgcttttcagccttgtcactatattcaactccagctgcatgataaatcttggtagcgactttctcaatcttgtctttaacatcgtcatcatctgcataagttggagttaaatctgccttgccagagttagccaaatcaacaacagcttgagcggcttctacaccacccttagaaccttcgccatgataagtaactacttcagcattaataccttgttcttcaattaattgtttaagcaaagcaagttcttggtcagtatctgaagcaaaacgattgattaacacgatgaccggcacattgtatgaacgcatgttgttcatatgacgctcgaggtttttaaaaccttcttttaaagcatctaggttttcttcatctaagtgatcagttgagcctaaagcttgatacttcaatgcacgaacagttgctacaactactgcagcatcgggcgtcttgtccagatgtcttgagacaaagtccatgaacttttgcccaccaagatcactaccaaagccggcctcagttaatacatagtcgcttaaatgcaaagccaagtttgtcgcaatgacggaattggctccatgcgcgatattagcaaaaggccccccgtgcactaatgctggtgtgtgttccaaggtctgtactaagttaggcttcagcgcattagacaatagtgcagcaattgcaccttggaatcctaactgtttaacataaaccggttcatcatccttagtgtaaccaactagcatgtcaccgattctactctttaaatcgttaatatcagttgccaagcagagaatcgccatcaattcgttggctacagtaatggcaaaactagcttgatgttcaacaccattaaacttggagccttgaccaaccgtgatttttcttaaagcacggtcattaacatcaagcccacgcttaagtaaaattcggtcaggatcaagatttaggctattgtcttggtagatgtagttatcaactaaagctgcaagtgtgtcaattgcggcagttaaagcatgcatatctcctgtgaagtgtaggttgatatcttccatagggatgatttgtgctttcccaccacctgtagcaccgccttttaatccaaaaacaggtcccatcgaaggttcacgcaaggcgatcatcgtattctggtgcaactgattgtgaattgcatcccccaagccaattgtaatcgttgacttaccttccccagcgggagtaggagaaattgacgttactaatactaatttacctaactttttactagcacgagtcctgttaatggcttgccaagtaatcttagccttatcatgaccataaggttctaagtcttcctctttcaagcctaccttagcggctatttcattaataggtaattctttggtttcttgtgcgatttcaatatctgatttcattattgcttattcttctttctagacatcattaaaacagaatagctttggtaatcactttttagttgataaacttgaaaattacgccaacttgaaagcaaagtcatttgattgatttttacttttgaacgatatggcaacttgagtaatattttgtctccacccttttgcaagtaagaaaaggaccaagtataaactgctaaaagtaagaaaatgataccaactactattccaggtatactaattgctttgttcccttcatagcccaaaataaaggcgataaatagaacgattaagagccaagaataatagataattcctgcaactcctagaaacatgaaatgccgtttagattttagaatttagatcacaccctatttatttaatcatgtctattgtatcaaagatttaatcaaaataagagggttgaacttacagcaattaaatataagtccaatcctctatcacatttatttactttactactgctatttcgtctctaacctttatattgcttgaatcgatgccaggtttttgaccgtgaagattaaagtctaaatcaactgtcggttgaaacagtaaatgtactcattgaaagctcagtagccttggtatttttcgctgcttgaccccatgctctcaatactgcttcgggaattcctttagcattagtcaaatttacgttacttaatttattaccaacatggccgaaggaatcaccattatcaccaatattattaccaaagtttacattgcttaggtcaatattggataaattactatcgccatcgaacaaactagcaatcgatttagcattagataaattccaaccactaatatttacagattcaagacttttatcatgaccaaatgttgcataaatattagtaacacgacttgtatcccaaccacttaagttaatactttttacatttggaatactagaaaataaaagtttcagattagttacattggaattcaaagttgtagtagttaaatcaatggcagttgcatttggttctttattgcttgaacgtatccattaactatttctctagtaatgttgcgggcatttgttagatcaacatcagttaaggcattattatgtgcaaaaaagttccaagcgtttaccacatttttgtatacagtatcgcttagatcaactttcacaagcttttcagcgccactaaacatttgtgacatgtcactgaattgacccatattccagccagcgatgtttacattttcaagattcttgtcattttgaaacatagatctaattgcagtggcttcactaacatctaaatgacttagatcagcagactttaaagtgtcactgttcattaaggctgcggtcatgtcacccttagcataaactttgttcttatctccctcactgtcaatagtaatgttaactgcacctgcatctttgatagtttctaataagtctttagtgatatagactttatcatcagtagttattgttcctgcattgataaaatcttgggtattagggatgtaaatatttttattaccagtacccttatatttagttaaagtgtattgatgagaattttgatctaaacttccatcccaatctgcagtgttgtactgactattttgagtggtgttagcttgtgtcttactagttgaagctactgtagtagcttgcttattggtagaagtcgtactctcctgcttgttttcattagtagctatcttgttcttactttcaattgatgatccgacatttgagttatcatcgattgaattgttcttagtagttaaatcagtatttgaaagatcaactttgttagtcgattttgtcttcacaatactagtagtgtcttcagttttattggcaccatttgtatctacattattagaagttttagttgtggaagcaacttgctctgtagtagtttggtcctttataacactggtagtagcactatcagatgaatttgcatcaacactatcagcatgtactgtttgactagagtaactcataaaagtcaatccaattagtacagaaactgcaccgattgttattttacgaattgaaaaacgttgtttaatagaatcaatattattgtttctaaggaaatatcattaataaaaaatgaccgagaaattaatctcagtcatcttcttatcaataagggtatctcatttctactaccctactcgactagtaccattagcataattcaaagttacgccatcttgcacgttgaaaatgtaaatattgaaatgaactgcatttgagttaaccgactgcccttccatttcaactccgcgagccaatagttcattgccacgaaagaccggtgtcacacggtagcggacgtagttgcttcgactttcttttacataatcagcaacctgatcctcatagcgcaacatatcaggatcatttagctgccttgtacctgtcatcaaatttttaatgttgttgttctgtcctgttagctgataaccaatcaaatggcagcgattatagagccagccgccagcaactcgtttattatgccaaccagtaggatcaacatgtagtggttcgcgtctagcgcttggcatcagcgactgaataagcaatgcgtttgcggcagttacccgattcaaaccatcgaggttaccatattcttgccatgctccgcgattagtactcaagtcactcttagaaaaactaggatcgttgttatttactgtaatgatgtttttcccagaatagttaagacttgccagttttgcggcactaacagattcaatattgtgtttgccagtgtacttcttgagttctttgcgcagtttagcaatctttttgtctaggctaacaattttcttttcagtttgcttgttttcctgcgcaatttgcttggtctttttctcagcactgtggtcatatttgatgatagttttaaccttggcgatgacattttgacttagactaggattagtaatcgcaccatagccgccaaacaaaaacaacgtacttgaaacaagtgtaataattttcttcttattcatcacctttttgcctttctgtaaccagcattgattgcatcctgctcactattgaagtaaaccgcatttgcggaattcatatgatagcctgcttgtcctggtacgtgataaatcttagaattgacgttaccgacaattttgccagtttctgctgtatctaggtctccatgattgccgccaccattagaatgatgtgttgcagttgaacgactagattgagctgactcgttttgccgtgattgttttgctatttgagtagcttttttagcagctgcttttgcctgttctttttgctccttctcttgttcttcttttttatccttagcatctttaagttcggagcttagcttatcgtactcatccttcttcttcttttcttcggctaattcaaaagtctgctcttctaagacttcttcatcagtagtgcttttctcttgaaacttcttctggtgctcaatatatgctggttgagaatgtactaattcacgagtgatgtttagaccatatttatttaatagcagtttttcagtatcactaattttataaatacttcttcttggtgagattagtaaaccagctaattttaaatcactaagcgcccaagctactcgactaattgctactaaatcatgatatttagaaggatatcttaaattaacaagttcttcaggtaaattaatctctgtgacaacagcttatcaagctctctacctacccattcttctttagtactcgctacctctagcatgggacctaaaaatgcatcccaagttggcatcccattttcactatgttttaaagttttgtagtcaatcattttttatctttatcaacttaggcgtattactgtaatgtgttcgcccagaagcttttatattaagattgactggttgcatcaaatttacgctagtcaatattgcctctcctgactttaaactcgacaactgagctaatttgtctttatttaggaaattattgattgctttaatttcatattcaccagttaaccgatgcattaaaagtgttcctatctgatttaatactatagttggcacatctttggggctttgagtagttaaaaatagaaatattccattttttcttccttctcgtgctaacgtagccagaggagaaataaaatcatcttgagcatctttttctaaagcatatctgtgaacttcatcaacaaataataaagttggatgttttgtcatatcatgatttaataagaaattacttatatagtctacaattacttgtcctaatccaattgaaaatttggaatcatttaaacgtatatataatgatatgtcattaccttgaaattctaacatttctttattaaggtctttgagtatctttttacctttatctgtttctccaaaatccttatcttgagttttactatctacgtttaaaaataactcttttagattatacgtcttaatcaaatattttactttacgtattagccaagaattagctccatatgtaaaataatcaaactggtaggttccttgttttatacctttattccaactaagttttaaagaatctttctcaatttgtttatctaaattgtttatatcaaatgattcattaaaaactttatcagattcccactgaatctgaagatgcttgtactgttcttgatttgccccttcacagtcaagaatatcatttcttataaatctattctctgcctcggttaaatttaccttatttaaatgctttttatagtattgaacaaattttaatttttttattgcctctaaaagctcaatcacttgggaattatcatttggcctaaataaagaaatccattgttcatcagtcaaattagcagtattcaagaataaatttttccctattgtttttaaattaacctcattttttgaaaatgcatctttatattcaccagttggatctataatcaaaaattttccttttagcttttgatatttatctaaaatcgctaatgcactagttgatttaccagaattcgttgctcctacaatcataaaatggtgattaaataatccatcaacactaattttgaatggaatagctttcttttcatttaaattaaagcttgaaaattcaatttgattatcccttttattaatttctaatgaatttatatatttcttaatagcttcatcattacagatatatgccttatcaccaattcctactgttagatctccgggcaatacaaacgtatttttatcgtacattgccattagtttaatttcaatatttgggtaaataatatcatcattattttctattactgccttatgaatattatcagtattattaatcctagaacttattactttccctaagaaaattggagactgtaaaatagtttgtgtaaggatgaatgattccttaaatttatttctttaaacattagaaaaaggagttcctttctcgtatgattggtttgaacaaaaaaacacatacagaaagaagaactccttcatgaatgattttaccaaagattttgctcaagctctattcaatccagacaaaataaatgatttattgcgcaaagagctacaacaggctgttaataacttgttagaagctgaattgactgcctttctgggctatgatccctatgccagaaatggctgaaatactggcaactctagaaatggtgcttatttccgcaaagttgatacgcaatttggcccaattgaagtgcaagtgcctcgggatcgcaacggtcaatttcatcagcacacgctgcctgactacaagcagcactcggatatcttggaaagcatgattatcaagctttactccaagggcgtgaccaccagggaaatagccgatctaattgaaaagatgtatggcagccattacagtccagctcaggtatcaaatatttccaagcagatgattccaaagggtgaggcttaccacaaacgcaagctaagcgacaagtttttctgcgtctatttggatgcgacataccttcctttgcgccgagaaacatttgagcgtgaagcagtctatattgccattggcatcaagcctaatgggcacaaggaggtcattgactactgcattgcacctagcgagaacattgaagtctggacagatatgcttcaaaacatgaaatcccgaggcttaaagcaagttgagctttttctttctgatggtgttgttggcatgaaaacagccttggccaggacttatcctaaagctcattttcaacgctgtttggttcatgtcatgcgcaatatctgcgctaaagtacgcgtcgacgatcgtgaaaagatcatgaacgaattcaaacaggtgcatcaacagacaaacaaagaagaagccacagctgtcctgcatgacttctataccaaatggggcaaggtttacagccatgttatcagaagcttgaaagacatagaaccagatctgctggtcttttataactatcccaagcagatcagagcttcaatttattcgactaacatgattgaatcatttaacaatgtgatcaagcgcaaagctaagcctaaggcagagtttccaactgaacagtcgcttgatgcttttattggcattcaggcaatgagctacaatgaccgttatttcaatcgaattcataaaggctttggtcaggttcaggacaccttagaatcctactttgattaaataaataattaaaaaatcaatttacgagaaagaactatttacacaaaagatttgacagtttcgaaaattgtgccattactatcaatcaaaacatgataattaatagtattagggcgtaaaacatcactttgattgaagcgatacttcaataaactcatgttttctatttgaatattagcaaaaatagaagatacagtagatattttacctaaatagtattcacatttgtctacatgcaaatttttgtctgaactatcaaaaaagttatctatcaaactcatagttatcccacataataagataaatcataattataactacacattgttgctttaagaaaagcaatattatatcctcgatctctcaaatcatctaaatcactccagttgtcattaacatcttcttgttctgtttttttatcaaaattatgaatattataatcagtaatcaaacaatctaaacttgagttatgcttaattgcgtttataatcattctacttatgtgattatcaccaaaactaaaacccgaagtaactaataatgtattaggttggtgcaacttattttgaaatcgagacatgagatcaaaatagggttcctcatagctctgagcatatttattagaacttggaaaaatcatttttacatgattactgttatctctaatcgtactttttacctcttccacagtcgatttagtaactttattttctttttcaatccaattaatagacccatgaattttaagaagatctataacatgctttttatagataacttgtttagtattaatattgttaacttctttactcaaaacccactcatacatatcatcattgaattctttattatttccaaattcaaatccatcaaatattgtgaagttatctttttccagagatttttcaattgctaaatcataatttgtagtcgcaaccatcaatttactgctatccgaatgaattaaattaagcaactttaaaatcactttatcatgcttaaatggcattttagatgtactatcgaaattataatcaactgaatcaagtattgatagtaaaataaatctttttaatttttttgcttgtgataaacttggatttctgacttttttaccagacatctctgcgtcttgaatatataaatttaaatttgaaatatattcttctaatggaaaagaaaaccatgtactttcatcatcaaaattaactttttcaaatttttcttgttgatctttaggtaaaaagatcttagcatccttttcatctaaatattcttctaaattatttgttccataaagctgattgaaaatattccatgaaatatcttgcatagtctttccataatttgaattaatatttccattctcattagttacaactgaagctccggcaccaactaatagcacaacattactataatctttacttatgaagttgcttttctaaaaacacaaaatcatgatcattatcatcatctggatttattttatctctataaaatttacttagtgctttctttttatcttgtttattatatttatcaggtaacgataactctatatctatttctttatctctgtacaactgcatacttaatctcctcgtattatataaattcatctcttaaaagttaattctaatatataaacaaattgtcaattttatcaacaattctattctgctccgctaatggtggaagaggtaatttcaaattaattaatttactcaaatatattcctttttgggttgtccctttcgcattagcaaaaatttgagttttaaacattgctgaaattaaaacataataaagaaacttacttaaaatattactactaataaccgcaacacttctttgagctgtaaaaagtttatcagtatcaacaactgcagcattacctaacgagcctacaatagtgagtaatacatctccctttcggatgtttgttcttttatcctcttttaaaaattgatcttcagaaacaaatctatttgataaagaaaaatctatttttccttttttaatgtttattgcagagataacttgttttccttcatgtgaattcggtgggggattatgcgtaccatcagtaatcctttttgcaatattccccaatctaacccattcccaactatcaggaatatcaaacggcttttcctcatcagtgatcggaggcaacggcttgctcttcttgatctccttttccttgatcatcttccgcttctcagccttaatcttctctagcaaaacactagctggttcatcatggggatcttgctcgactaattttccacgcattgccaaatccagcaccttcgacttcagcaaagtctgaagttttgcgtattgttgagtagaagattcgactttgcgaagcaaagcgaatagctgcgctattttagcagcgattcgactttgctcttcaagtggtggaagtggaacaagagtttctttcaacttttttgaattaattgttggtacagcagatccttttacaaagtcttttatgtccaagcttaaaaacagatagaatatgaacttgtgatttaagtcattgtatggtattaatcccccagtattaagatcaaccaatgaatcttgagacaaaattcttttttttgcggttaatatagctccaccgtttttaggaaaaataattgtatttttaggcattacttgtcggctatatttttctccaacccaatttttcacgttttccatatataagttattattattcatatctttaaccttaaagtatggataaatattatcactacttatgtcttctttcttgggagtttttccattttttagtaaacctacatcccccaatctaacccattcccaactatcaggaatatcaaaaggcttctcatcatcagtaatcggagcaagcggcttacttttcttaattttcttttccttaatcaactgctctttttcagctttaatcttctcaagcaatacactagctggttcatcattaggatcttgtggcaccagctttccgtgcatggccaaatccaagattttttctcttaaagcctgtgcatcaaaatctaaagtattagtcttcatcgtcaattccttctaacgccttattaagttccgcaattgcatccctaattgccttagacttgtcattcatctcatctaagatttctttcaacgaacggttatcgtgctcttcttcatcattcatccaagaaatatcaaggctagtattaggacgcttcaaaatttcatcaatcgtaaacttgcgccatctaccgttagaattcttctctttatcccaagtttcttttctctttgagcgatcgtcaacgcagaatagtttttcaaattccgcaaaatccttgtcacttaatggattacgcttaccaaatgaccgcatctgatgacgcatatcataaatccaagtttccttggtattatccttgtcactttcaccgcgagtaaagaataatacattggtctgcacaccttgagcgtagaaaatcccagtaggcaatctcaagatagtgtgcaagttgcacttgttgagcaagtcttttctaattgcttcgccaacaccatcggcaaacaatacattatctggcacaactacggctgctctagctttaccattgtgtttaagtgaattgtagataatctgcaggaagttcaattgtttattactagtcttataagttaggtcgtcacgacttacactgtcgtcactacccttcttggtaccaaatggcggattagttaaaactacatcaaaatctttcatccatttaccatttgaagataatgaatcccctagttccaatcgtccatccatgccatgaagatactcattcatcatggctaaacggtgcgtggtttcaactaattccataccagaaaaagcttcttttacttgaaattcttctttatctgcggacaaggttgaataatcatctgtttgatcttttaaatatctgtcagctgctaccataaagccaaaagtaccagcagcagggtcattacagcgatctccaattttaggctgagtcattctaaccatcatgttaatcaacacacgtggggtaaaatactgacctgctccagatttgacttcgctggcgtttttctccattagaccttcatacaaatcaccaaggccttcgtcacgagctgaccaccaatcaagtgcgtcaatatcttttattattttttccaggtcagcaggtttgtgaattgaagtagaagcatcagcgtaaattgaattgattcttggactattaaccacttcaggattacctaaatcaagtaataattggcgataaaagttacttaactctagtccttcctttgaaacaagattatcccattgatatttttgggggatatcatcctgttcaccttgttccttactcatttttaagaataagatataagttaattcagtaatgtaatcttggtaactgacaccatcatcacgcaaaatattacattcattccataacttttgaacgatttcttgattgttcacttaattttgctcctttaaaaattgtctcttttgaagatttccggtagatatatttgaatattagtaaatggatcatcattaatccagtcactctttttccgatacaacttattggcgtgatctactgcatcttgcactttatcaaaaatatattctcgataactattacctttaaagcgactataatcttgattaaaataggcagatctagacagtttctgtactagctcttttctagtataagaacgagtgacactttcaaaatgcattaaaatccaaatttcaaagtctattgaagaaaacataatagtaatatcattttttcgagcaagtttagcgcatttccttaattcatctttagaatgctcatctctatcgaaaacaacataagttttatctaaatgattatatttgccaaacttaactgctttttctactagacttttaccagacaaatctgcagcaactattttaactttaatatttgctaaacgatatttctgcttaagcatagtaaaatattgtttttcagattcaccttcacacagaattccaataattggattagacttagtcttatttcttattcttcccatgctcatccccatatttttcatgaatcatttgcaatacatctagcaaaccatctacatctattacaggaactgcaccgaatcggccttgtaagtatctcttagcaaacgaaatatcatgtcgacctttattacgtgcatcttcaaagtcaaagattgatttcaaatcactaattccgtgaaaatccttgtctaataaataaatttgatcaattcttaaatcgctgtctaatagctgaatatcatgagtagtgataataaactgattcaaattttctgttgaattaaaaatacgaactaaagcagctgcaagttcaacatgcagtgaatcatcaaattcatcgattacaatcgtcttctcgttaccattcatttgagcaagcatcattgctaatactatataaaataaacgacgtgtaccaacagactcttgtgttaatggaagttccccagaattaataacttcattttgatgataaatcttgtgaaccgtatatagttctttagttgttttaggataatcaatatttaaattctctacaatcttttgtaattgtggattcaacggattagtaggtacttctctaattctaatatcagagatattaaaatccgcaaaacttaagaatgagatcatttcttttttgaggtattcatcttccatcaaatttaaaagttcgtcaggaatatttactggatagccgctgccaataaaaatcagatcattaacaaaccacttatagatagcaatacaatctgcatcattttcagattgtgctaaatataggaataaagaattatctctaagcttaggaatgctgtcttccaaaagcttgttagagacttgaatgtcatttccatttcgagaaaaaatttctttttccttgttaccactaattaaggttaatgcttcactggtaatgctctctcgattgtaactaaatgaatagtcataaattttgttttttaactcaagcttcacttcaaagtaagtatcttcaatcttggacttttcatcaaacaaaaaaggataataatttaacttatcagttacggcttgagttggacgtgttactattccttccattgtttgtaaagcttgaatcaattgagacttacctgaaccgtttggaccaaataacagtaagctttttaataatgatggatttttacttgagaaagtattagtttctttcaatttacgtagtctattgcctgtctctgcagacaaggtagtgcgctctctaaaagaagcataatttttaacagtgaactcgattaacatattgtattcctccgtgttaatttaagtttagcacacgcctttttttatcacaacttttcgtgattaaaagcaaaaaataccagtaatggcatttttaaacatataaattctcattcaacacgtaaataatctgatcagcattttctggaaagatcttcttaatttgcttataacccccgtgacgtttaaagaaatagttatcatcaaaggctttctcagcatttggccccaatacagtagatgaaattaattggttctcaattctcttcaaccatttcttttgaggaatagtccaatcagctaaaccataaactttttgcatggcattatgaattctaacatcatgatccaccaactcagatccagccgcagcttgtctaatgaagctaataatatcggcagtggtctgaacatggttaacgtttttccatgcactttgcaaatcattttctttaaagccattttgctctagcttaagtttaatatttttgagttcatcaaaagttaaatccttcggtctagtagctacaacttgtaaggctggaatagtattgacgttttccttaacgaatttattgaagttttcaatataatccgctggtttttgattgccatgcccataacctcgacttacattaattactttgtctactgcgtctgatattatttgcttgggtttgacaggtttgatgtgatctaactgctcaaacttaggccattgctttaaaaattgggacttatctaacttacttaattcacgggcccattgatcaaccgaattaatctcagctagatgttggaactcatcacgtttagtatcatccaaacgtttaatttttctctcaacggcaccagccatatctacttgatactgagcggaatcctcatttgtctcaaagaaatcatccttgtgatttaagaagtagtgaacattatgtcctggatttttaacaacaggcttcatgtttgtcactttattcattgcttcatagattccgacggcatcataaatcgtaaatttggatttattaatttcgggacaaagtctggttgcccgtcccaacatttgctcatagaggattcttgactgaactcttcttaagaagacaatactagtaatttgcggtacatcaattcccgtagttagtaaatctacagttactgcaatattggggttggtttcattcttaaagtttttaatttcttgattaggatgccgaattgaaccagtaattttttcgatagcatcgtcatctacaggattactcacttttttgaatgcttttttcaataagtcaacaaccatatcagcgtgttcatcagttgccgcaaagattaaagttttacctaaatttggatcatttggatcaagatatctttgagctaattcatcacaaactacttcattaaagctacgtgtgataactctcttattaaagtcttttacatcaaaattcatattatcaggtaatttttctttattgatagttttttcatcctgatcaaaaagactaacttcggcaccctttttaaaatgaatcccttcttgagacaattgagtttgaataattactggtgcatcatgatccactaaccagccatcgaggacagcttgttggtagctatacgaatacaccggtttgccaaaaatatcaatcgtttgtaaagctggcgtagcagtcattccaatagcagtcgcatcaaaataatcaactacacgtctatattgactaacataatcttcttgactatagaattgatattctttatcgctgagctctttatcttctgcataaccacggtgggcttcatcaacaataatgaaatcatattgaccaacggatggcttatcatcactgtcttcactgaaaaataggcgtttgatcatcccctgaaccgttgcaatttgaatttttgttgatatttcaggtgccttatcactcaattcctttaatccataaatggaagaaattgacatcgtacctattttattatctttaattgcattggcagtctgctttcccaatgaattacggtcaactaggtaaagaatacgtctagctctcttatgcttaagtagtctgtacatcaaagcaattgccgttctagttttaccagtacctgttgccatggcaagcagaatacgcttttttccatctttgatggcattttccatcgcttgaattgcagcaatttgatattcacgatgtgcaaaatcaggaaaatcttgatcatctaccaagtcttgatttgcttcttctttatttttagcagaaagcttcaacgataaatcttctggcttatgaaattcctctagagcatatgcgctttctttatgattacgtgcatcccagaaccaaataccagatttttcctgatattgtttaagatatggacgaccatttgcagtatagatgaatggaactttgtaatcacccatttcatttgaaactagacgataatctgatctaaacggtacctctttagaatattccttaggctgtgccatttgccctacaatatcttggtcccactttttggcctcaacaattccgtagaactccaaacctttgaataatgcataatctgctcgctgaccattaggtagaacccattcagcaattgccatattgtgacctttttgcggttcagttttctgcgtccaattgttcaatttttgtgaatctacttcccagcccgcatctcgcaattgttgatcaattaactgacgtgtttctgcttcagttaactcatgttttttagcaaattgaacgttaatctggcgtctgcgttcacgctcttcaggagaaattatgacttcctgcaccctattttgttgtaattgctttatcttttcttcgagagctttgattttatcttcttgagttttaattaaagctttttgatcttgtggctcaacataatctgcaactttatccagagaataaacttctaaaaaccatttccataccaaataagcactctgatcaatttcaagcgcaatctttttggtagcaataaaatgatcgtcatgcgttgccttgttccgtcttaacctgatcaaattaagagcattcaaaacagtaggtggatattcattcttagaatatgccattttttcaattcgttgtttttggtttaattcccaatcacctaaatcatccaaatgcatgatttctttagttaattgctcaccgaaagtaccaaaaactgtcaaactacttctaggatcagagtaaattaagctttcagcgctggaagccaattttgcgtattcttgataatctttttgtgaagtttcaaagttagacattgtttttcctctaatattaaagtaaatatagttttattctacctcgaagccccatttaataacaagtagtgtaggtacaaaaaaagaagcaccaacacagtgcttcttttaacataaactaaataatcaatcgaaccctacttcgccaaaacatattcaaatcccaacatattggtatagcgattactacctatcttaatgtaatcatagcctttgatcctcttggtgccataagtttggacataattctttgtcctggtattctttgacttgatttcggcaacttttttaccctgggcatttaccacaggtgttacagtttgcacagtgtagtaatgtttgaccacttttagcttagatgcttcgaaattaccatacttaacatatttatttacatcaattttgacatttttttgccctttaatagtcataattgcttgaattttgtaaggggtccccttcttcagtaactttttcgtctttatacctttagcagtataaacgtatgcattactttgcaatttctttttcttgccaacagtaatgccatcagtgattaatgggctaatatcgactttgcgctttctaatggtatctgaagaatagccaaaccaaaatggactcttcttggtaacatcccatactggacgagttgttggatattgccaattacgtttgctgttataaagttgaacgtcaagctcacctgtaacttgaggctggtaatagttgtagatcaggttcatcactttttgaacctcataagtagttaactgatcagttcgtctaacgagcaactttttaccatcaagtgctttagtcgtattagttaaaaacttgtcagcttgactaaccgcaacttcactggcatttgtctcaccaacaacagttttagcattttgcaaataagtcaagaactgtatctttttatcatagtcagctaatttatagcgatcagtcttttgaaccttttctgcagtggcaattgcagtagacaatgatgacttattagttgccaccttgctttgtgattctgcttcaccggctgtgttgattggcgtaagttttactccctcaacctttttgacattactagccaagatatagccttcattatctaacttattagttttagcattagcttcacctgttgtatggtagaaaagttcagctttcttttcacttggtacccaaagatagagtgcttcattaattttgtggttgctatacattgcagtttcttcaaccgtattggtatagaactgtttagatagctcttgacttgtcttttcaccgtcaacattgtacaaaagaatctttttatccaagacaactttggtagaatcggccaattcaagatctgaatgattctctaaagcttgtggcaaattcagatcatcttctgatacccaataattagtgcccttgatccggtagtatgaatagtgatcatgatcaaagtctgtcaattgttgtgggaattgtcccgcataatcaactgtgatcttttgtcctttcttcaattcaatattatttggatctgtaccccaacctgttgaattaacatactttgtaatggttgaagtattcttattgaccgttacggtaattggtgcatgagtagtaagacgatagccgtcaatgtaaccgatgttggccaccttgatataacgaccggaacctaaataatagtagtcttttccattaattatggtataaggaatgcgatacttacctttttgagcctcataataatactttgctttactactagtagttttccgcttaccagcatatttgactacgctaccctttttgacaaaaccaacttttttgccagacttattgtaaatattggcattaaaaattgccgttaaataagcagggccagatattggcgttacataatctgaagaaatataaacattcttgcgtaaaggatagtataactcaccagcactgtagtcgcctggatcaaccgtcttaaaaaatggttttccatagtatttaatcgtgctgcctttcttaggtgcagaaatatgatccaaataattgcccgagcgattgtacaacataatatgtgaatcaatgacttttaaggaaccagttgcattgcttttagtagctgcggcaactgatgtttgaacgtttgaagttagtggtgctgcggcaattggagacacagccaataacgcagtagaaattaagataagttttttattgattttcataatgaaccttcgatctaataaatgcagttaagatttgatcagttagtactcatatcatcattatagcagttatagttatttattccttgatattgagcctatcaaaaaagagatcgaaacccagtgtctcaatctctttcgattttattttgttttcttcttacgagtccataatccacttaaactcaagccagacagtaataaccctaaccatgaaagatcactatcttgcctaccggttgctggtaaaacagacttagaggccgatctcggcgtaatttgttctactgtatcgtttttcataatagaagtttccgttttacagcaactaatctcactaccacttaagcttcagtttatggctactttgctctacctgtaaaaatgaatcaacgtagcgcttaaaaccaggtaaatatttggcaatcaaatgatattctcgtgaattaacaatttctttcttttgggctgcagaataattactttcacctacaaaaaagttccaattcaattgatctataaattttatgaccacgttagcatcatttttatctgataaagcttgcgcaatctgatttagttgcttttcatccaaactaaaaaacaaatgcttcaaatattgcgaaaaatctgttggcactttttgcttttcttccgcagttaaccacgattccattttgaaggaatgcacctgatattgcatccccgcttcgtctaaatatagctgaccatattcctgcttagtcatacaaaaacaagctcctgctacctccgcaattggtcgattagcaaacggaccaataatattctgtgcgtgcatatggccagaaaagactgcttttacattatatttttgtaataaaccttgcagtgcaagtgcattatcaagaatatatccctgatagattactttattatggcgatacagattatgatgcataaagaatagcacttgttgctgcttttgctgcgcatcaattaattctttttcaatccagttcatttgagattctgaaattcgaccgttagtaatcagatgagtttgtgattcctgcttgccataaatatttgagtcagccaatattagtcgatactgcttattcagattaacgctataagccagtgaatcaggatcttcatgtaaagcataatgataagaatcagcaaagatctctttccaaatagctgggctaatttgcggggtgtaatcttcatgatcacctttaaacttgcgagcccagccgtcaaaaatatcatgatttcctggtaaaactaagaatgcaattttatttttagttaatggcttaaaaatattagctaaacgttctcctgatattttagcgccattaaaggttacatcaccagtaattatcactgcagtgggcttctcttggattactttacgtacaaacgcggtcaaagcaatctcctgataatctaagtctttacctgcactagtgttgcgcatatgctgaaaagcaagaccatcatcatgtaaactatctgcaattagatgtgtatctgataataaccaaagaattggcttctttttactagtaatcacaatttacctttttcaaaaatctattttcactttaactactcatcattataccaacaaaaaaggcatccctgctagggatgcctcattgcgataaaatattgaattaagcgtcgatttcttcgatcttaatgttaactacgaatgcttcaggagtatcagtgcctgaaacgatcttcttagcgtaatcgtcgccttcatgaatttcagcatgtcctaaaacacgaaatgccttatgagtaggaacatcagcgacaacaatagctgctactgaaccattcttcaagtttgcataagcagttgacttagtcttttcaagatattgaatagttgaagcatcaattgccttaagtgaagccttaggaccaacttgtggcacaccgttagcattcacagttgccatgtatggtaagtgtgagttaaaaaattcaatttgttcatcagtaagcttagtagtatctaattttttcataaaattcgacctttcttttcttaagttcattattaattataagatatttgctataaaatagctattattttgccttagcttaattgattcttacatttatcatacacaagatattgtatttaataaaatgtgtttttaattaaatttctcttgctactaatatttttattaagtaaacagtcgttgatatatcaatgcttataaatgctggcaaaaagtcaaggattgaattttattttttagccagtagtatattatcttgcattagttaataagtgatacaagatattgtgcttattaaaataaaaatatattttaaatttcatttttattaatgttatttttagtgaggagaattcgataacaaagaaaggcttaacaaaatatttatcaattggtgcagtaactactgcagcattatttttagcagcttgttcaaatcaaaagagcactacatctgctaaaaatagtaagacagaaattactatgtggcacgcaatgaatggtgcacaacaaaaaactttgaaacaattgactaataaatttgaaaaagaaaatcctaacatcaaagttaagctagaaaatcaaggtaattaccctcagttacaagggaaaattacttctactcaacaaaatcctaataacttaccaacaatgactcaagcttatcctggttggctttatcaagctgcgcaaaataagatgttggtcaatttgactccatacattaataattcaacttatggttggggctcagtagccaaatctaatattcgtcctgaattaatgaagggtgcgcaaattaatggcgttcaatatggtattcccttcaacaaatctattgaagtcttgacttataacaagaccttacttaagaaatatggtttaaaggtacctaaaacaatggcagaacttaagtctgtttctaaagcaatttatgaaaagtccaaccataaaattgttggtgctggttttgataacttagccaactactatgttctaggtctcaagaatgaaggacaaacttttggtcgttcaatcaagttagattcggctgcctctaagaaaattattaacttctacgcagatggcgtacgcaatggctactttagaactgctggtagtgaacgttacctctccggtcctttttctaatgaaaaagtcgcaatgtacatcggtacttcagctggtgaaagctacactaagatgggtgtaggcaacaagtttacgtacggcgttgctcctcgtcccggtgaatacactatttctcaagggactgatctttatgtctttaaccatgcttcaaaagcacaaaaaaatgctgccatgaaatatatgaagtttttgactagcaaatctagccaattaacttgggctaatgagactggctatattcctgttaacgataatgtcttaaatagtaaggaatacttagacagcaagatgaaattgccaagtgtcttaaaggattcaatgaagcatctctacagtgttcctgtagctaagaattctgactctgcttataatggtatgaatcaaattatggaaaatattttaattgctgcaaataagcatcaaaatgttaatgctcaaattaaggctggtcaacaaaaattagatagcgcttggcgtcaataatgatattaaaaaagcatccctcttctctattttgattagggatgcttttttgcatttgcaagagttgaatttaatttaagcactcacatagagtgcgacgtgcaaagaacctacttttgactggggcaaatgtatttcatccaatcctaaatatttggcttcatcaactattatactatgtcaaaagtatataaagaagagttaacacataaaatacaaaacaaaatcagtgcgaaactccctcatttttatgttcacatagggttcgcactgatttttttcttaactcaaatctttcttagtaactgccaaatgtgccttatcattgataaagacccagattggcaaatctattcctgttgaatcagtcaaattatttacaatttcactgataaaaagctggaccattttcttaggcggttcagtaaagtctcttctttgcggcgtgtaccataaacctgtgattggctttttagtttgtcgatcgaaaatacaattcagggtttcatcatattgatcaaatgaggccttgtagactatatgtaatggatgatgtgccaagttctcgactaactgataacgcatatcgtccgcaatttttcctttactaatcatcattaaactggtaactggaccattttctttttcaaatttttgcaacttgccttgtttgattagcttcttttcaactgaaataaaactatcagaatcaactaacatcgtttttccttctcgtattatataaattaaatcagtgataatgattattcttttagtttgtttattcgatcatcagatgctagtctctaattgtcattgaccttggtcaattggtataggttgtttccttctgtagctttgactacttttttagtctgccgcccaagcagttttactaatgacttactcacatgctgtatcgattctggctattactgattcagagcagattcagtcgcagctttttagcttgaacctatgaatacttatattttgcgagattgtcttagaatctgtaattagggactaacatgtgatgatcgatctatgaccaaatatttgctagaaaggaggccattctcaatgaaactttttatcggaattgacgttagttcaaaagatcttcaagtcgctattactgactcagaaaattatcaaaaacctttacttaaccaatctttttctaatgacctgattggtgctaatgaggtcaaaaagataattcttcaacttgctaaacagaacagctatgacaaagtaattatcggcatggaagccacttcaatctatagctttcaccctgcttatttctttgccaatgacgaagatttacaaaaaattaatcttgaaactgatgtcattaatcctaaaaacactaaacgatttcatgacgtttacgaagaaaataagaatgatcctactgatgcctattacatcgctgaatacttacgctttggtaaataccatgtcactattgctcggcaagaggaatacttagctttacagcgtttaactagagctagatatgaaatcacatcttcgctcactagagctaagcagcacttcattgaaactctttattatcgtgtaaacaaactagttaccgttgacaaagacaatattaaaacttctatctttggcgcaacgatgctgtcaattgttactgatagtaaaaccatcgatgaaatcgctgaaatgccaatcgaggatctaattgactaccttcaaaccaaaggacgtggccgcttctctgatccagagactttagctaaagcgatcagaaaagccgttagaggatcatatcgcttaggtaaagtcatgaaagactcgattgatgccgtattatctgtttactatgccgaaattaaaactaatcagaaattgattaagaacttagataaagcaattacagatatcgtccaaacgcttcctgaagagagaatactacaatctattccaggaattgggtcagtttattccgctggtattatcgctgaaatcggcagtattgatcgctttgacactgaagcacagctagctaaatacgctggtctagcttggcgtcaaaagcaatctagtaattttgatagcgaacacaaaccgatgactaaaaacggaaatcattatctaagatattatttggttgaagctgccaacctgattagacaaagagatcccgtttttcggaagtactatcaaaagaaatacgatgaagctttctattctccgcataaacgcgcttgcgttctttgtgcaagaaaattaaccaggaccattttcactctgctcaaaaatggtcaaatctatcaaacaccgaggtgattaattggtctaaaacatttttggaggagtaaataatagttgttaaaaaatcccttgaaatagggcttagtttcatgcacgcaaattttggttttaaaacaaactaattaaaaataaaatttaacttttacattgacttattaccacatgactctctactatctattataagcaagctgtcaattactttacataattttaattattatgcaaaaaaagaagccatgacctgaaaatcatgacttctcgcgaattcctcgtccgtaaatcgaaatcttcacgaacatttttaccttaacacaattaattatactagtctaattaattttaattactaaagcttcatatggcttcaatgagatattctctcctagtttgccatcttgtgcagaataattgctcaatacgagttgataattcttattttgatattgttcaggcaatggtgctacatgatcagtaccatagaaattagtgaaaactaatatttttttagcttcatctttcaaaaaacgttcataggcaaaaatttgtggatcatcttttaaaaacattctaatatggccatcagaaatcagttgttcgtgcttacgcaacttgatcaatttttgatagtaagcaaaaatttcaccctcgtgtaattctttttcaacattaattctatcttgatctgttggtaaaagccatggctttgattcactaaagccagcaaatttactatcatcccagtgcatcggcacacgagagttatctcgtgctttagtttttactattgcaaatgcttcatcatcgcttattcccttttgtttcaatgccgcaaaagcatttttagcttcaacatctacataatcatgaattgaagaataatgtggatccatcattcctatttcttcgcccatataaatgtaaggagttccgcgcatacaatgtatcgcagtagcaagcatttcggaagatttctctcgatatttaccagtatcaccaaaacggttaagggcccacggctggtcatgattgttccagaacaaagcattccaaccgccaccttgatccattttttcttgccattcagtaaataagtgctttaatttcatgaaatcaaacggctctttagaccacttttcaccatttttataatcgacttttaaatgatggaaagtaaagaccatggacaattcatgctcactcggcttagagtactcaatcgaattagcaatagtagttgaagacatttcacccaccgtaattgagtcaggatcttgaccaaaagtagagcgattcatttctttcaaatattgatgcactactgctgtatcagtataaagactcttttcctgacttggatcaccagttgaatcaactaacttttcatccttaccggtcacgttaattacgtcaaaacggaaaccatgtactccctttgaacgccagaagttaattactttgaacaattcttgacgaacttctgggttatgccaatcgagatctgcttgagttggatcatataaatgtaggtaataataatccgtatcaccaaattttgcccaagctggtccaccaaacttactttgccaattattaggcaaggagccgtcaggcttagcttttcttaagtaaaagaatttgcggtacttttcgtctcctgccaaagcttttttaaaccatatattttcggttgaacaatggtttagcaccatatccaacatgacgccaacgcctatttcttttagctttttagttaattcctcaaagtcagacattgtgccaaagcgaggatcaattcggtaataatccgcaatgtcataaccgccatcattctgaggggatacaaaaaagggattaaaccagatcatatcaacgttaagcttcttgatgtaatcgattttagcgatgatccctggaatatcacctactccatcgccattagaatcataaaaagatttgggataaatttggtaaattacttttttgcctaaatctgtcatttttatctcctataacttaattttctgtctacgagcaaagtcaataaatttaaactttttaggattatgaaaggataaagttaactgaaacagcgttgtatctgctaaaaaattatgactagctactagtactgcttccttactatccaattgcaatttctcttgtaaatcagcatcgatttcttctaccgtaattgccttagttgcataggatatatctagccctaatttattttctaaataattgtagattgatttttctgcttcttctggcggcagctcagtaattggtggattaaataagaaatcacagtccagcacttctggttcatcgttaatcattcttaaacgttcaacatagatcccagcatgcttcttttgttcagggaagaatttcttgaaaattgccggcaaatcatcaaccatttcatcattaagtagcttagtttttgcattcattcctaatgatttatttaattccgcaaagctagaaattcctgaaataggaaacgaaaacttttccaaattaaggacaatcgaacctttgcccttgattttttggattaatcctaacgaggtcaattgctgcaaagctttacggactgtttcgcgtgacgcgccataaagctctgtcaattgattttcactaggcaagcgctcgccttccttaaattgttgatgtttaatcttagaagctaagtcttgagcgatcagttcagattttgctttagtcatcttgaccttgtcctttcttaaaatcatgttcattatatttttgatgtacgtacatgtcaatagatatatctaaaaactatattgcaggcatgtaatcattttcataaaaatctattgacaacttgtacgtacatgaatattataataaatgaattttgtgaaaacgcttttataggaaagggagaataacacttatgaataaaaacgaaattgcattacttgctcctgctaatggtcaagtaattgcactaagtaaaacaagtgatcctatctttagcaaaggaactatgggtgatggttttggtttaacaccaactgataatacagttcttgcaccagttagcggcactatctcaatgattgctgaaacaaagcatgcgatcggaattactactaaagatggtctagaagtattggtccacatgggagttgatacggttggacttaaaggtgaaccttttgatgtagtaattaaaaatggtcaggaagttaaagctggtgaccaaattgccacgatgaatatagagatgattaaagcaaaagatcttgatactacgattatgactttaatcaccaattcatctatgaaacttgatggcttagatgtaactgaaggtaaagcagaagctggcgatacagttgctcgagcttatttaaaggagtcaaaagaagatagttcagacaagaaactttcgtatgatgaattagctactttcattattaagaatgttggtggtaaagataatataaataacctgattcactgtatcacacgtttgcgcttttatttgaaagatgagtctaaagccaatgatgatattttaaaaaatcaacgtggcatacttgacgttatgcatgctggtggtcaatatcaagtcgtaatcggtaatgaggttaccaatgtttacgatgcagttataaaacaattgcctggtcttagtgacaatccttcacctcaaactaataatcaggatgatggtaaaaatcctgtttctagagcctttagtaatctaattggttttattaccggctcaatgagtcctgtaatcggtgttattgcagcatcgggtatcatcaaaggcttacttgcactactcacccttccacaacttggtgctttacttagcgtcaagagtccggtctatgtcacagttagtgctatggccgactctgctttcttctttctaccagttctagtaggatttgcagcagctaagcggttaggatccgatccaatgattgctgcagtaattggcggtttcttagtttatccacaaatgattacttggggcaagagtatgacgacaatgtttagtcttggatcttggaacttccaattcttaaactattcctactctatctttccaatgattttagctgcttggctagctaaagaatgtgaacagtggttaaagaaagttttgcctagttacttgcaaatgatctttaccccattaattactatccttgtagtttcaactatcacattagttattaccggtccaatcattcaaggagccgcaaatggtatcgcagtctttattaactggctagtatctgcatctggctgggttggcggcttaataatcggtgccttttatcagttattggttatttttggtcttcactggggcgttgtgccactagttgctcaacaaattgcctcaactggtcaaagctcattaaacgcaattatctgcgcaacaatggtttcccaaggtgcagctgttcttgcagtcgcaatcaaatcaaagaaagcagacatgaaagagctaggaattgcagcagctatttcagccttctgcggtgttactgaacccgctatttatgggattaacttaagatataagaaggtctttgcttcaggttgtattggctcagccttcggtggcctagttactggtttaatgcatggtactatgtatggctttaccggtggtctaattggcttctcaagctttttcaacccggcccatcctactcaactaaatagtttctatactttcctaattgccagtgctgtttcaattatagtttcatttattgcagtttgggtatggggatataatgacaacatgactatgggtaaaaaagtagccaagaagcaacgcccaggttcagctaaataaaaatttagagcaaaataaaacgatgaatcacccacaaaggtaaattcatcgttttttgtcttatttaagcagcatcagcaatccgttgtgcctcaattaattcagcttttctgatatcacgaggcaagaactgacgaatatcttcttcattatagcccacttgcatccgatggtcgtctgcaataataggtctctttaataatcctggattctgagtaattaaatcaaccattttagacaatgacaagtcttcattcaacttattctttaattgtttgaaagactgtgaacgagtagataaaatatcctcagttccattttcagttaaagacaacagatgaaggacatcttctttagataattccttaaagacgttcttttcattgaaagaaagatgatatttgttaagccatgctctcgccttacgtgaagatgcactacttgttgacatataaagagtaatcatacaatacgcctctttctaaaaaactcgttaacttctcgtacattagttctattgtataacttactttttgatagtgcaagctatttttacaaaaaaattgttgaaaatagtatacttaccttactgaaagaaggaatttgatgaattttaaaacaccaattgccgaacaaatgaggccgcaaacactggcggatatggtaggccaaagtgagttgctgggaccaggaaaggctttaagaaatattatcaagcagcatgttaatatttctttacttctctgggggcctcctggtaccggaaagacaagcttagctcaaattattgctaaagagaatgattatccctttgcttcctttaatgcttcaattgataataaagcacagttgaacaacattattaatgcttataagtatcagaccttcgttcttttaattgatgaaatccaccgtatgaccaaaaatctacaagattttttattaccttatttagaaaatggtcacgttctacttgttggctctaccactgaaaatccaattatgtcgattgtgccagctgtgcggtcacgttgtcaaatctttgagttcaatcctctaacagaagacgatattgcagctgttttgaacaaggcatgtactaaggtccttaaattagtagatcaccaagttgaaaaaaattcgttaaatttgatagcagccgcagctgatggcgacctacgaattgctttaaacattttagagactgttcatgcacttaatcctaaaaagatcaccttagcaaatgttaaatcgtttactaagcagcaattctttagctatgataagaaagccactaaacattacgattatttagctgcatattctgactctatggctggctctgacacagatgctgcactttattatcttgctattttgctaaaaaatggagatttagcttcggttgtacggcgtctgcgtgagattccatatacttatattggcttagctaatccgcaacaagtaactcaaattgttactgcagctaatcaagctgaaaagataggaatgcctaaagctaaatatccactaatgtttgcaacaatgttaatgtgtatttcgccaaaatcaggagcatttgaggaaatttgggaaagacttgatcaagatagtgatcatcccaatcggtatcccatgcctaatagtttgcgtgactttcattataaacacgctaaagaaatcacgggagctggcctagctgagtcaccttttcaagctccgcatcaaatcgccaagcaaaattatatgcccaagggactcaaaggcaaacaatattattttccaaaagacaatcaaaatgaacgcagattatatgagcaatacctaaaattacatcgttatatttacggcgaagattatcaaaaataaaggacagcaatgcaattgagcatccctgtcctttttggttagattataaatgaagaaaattggtttattaattgcttctacgagagaagattctcgtccagccacctatatggtagttctatttaagttatttgttaaatgctaatcgaaaaaactttacgtactttttacgtattttattaccaataataacaaaaaagcagcggcgcaaatacagcgtcactgcaatatgtagcaagattatcaatgaagaaaatggtatttatcacttctaaggaggaaggatatttcatctagccacttatatcctaatgctacagtattaatttgttaaataaaacggctattaaatctaccaatatttttctagtggcttttcattcctaccagtgcgagtttgacgcaaatgttcagtcacaatattagtcaacacttcggctaatttatcaatctgctcaacagtcacatattcatatcggccatgataattgccaccaccattaaataagttaggtgtaggaattcctttaggcgaaataaagtttccatcagttccacctctaaaggattgtacatttggctttagtccagacttgcgataagcatcaagagccagatttacaatatatggcttgtccttaatatagttgtagatattttcatattgctcacgaatatttacagtaaatctattgccatactttttgttcatctttttaactatatcgcgaataaactgttctttacggttatattcactttgatcaaaatcacgaataatcatgctaatatcggcatgatcaacattgctttgagcatgtagaaccaagaaataaccatcatgattacgtgacttttcaggcacttgatcctgaggtaaattagacaaaaaatcattcatcaaagttgttgcgttaaccatcagaccatatgcttcaccggggtgaactacagtccctttaatatggatcgtaacctctgacgcattaaaggtatcgtattcaaaatctcctggccgcccattgtctaacgtataagcgaattctacattaggaaaatcagctggatcaaaatattgaccaccacagccaatttcttcgtctggaccaaaagcaacaaaaacatcaccgtgttcaatttcaggatgttcagttaaatatttaagcattgctaatgccccagtgattccagccttatcatcaactcctagcaaagtatgaccatcagaagtaattaaggtttgtccttttagatttaataagtctggaaactcagttggatcaagaacaatattatctttctcatctaggataattttctgaccatcataattttcgtgaatttgtggcttaatattaactgcgttaaagtctgcagtatccacgtgagcaaagaagccaataggcgttaccttttctgctgtgtttgcacttaactttccaattgcaaaagctgttttttcattatagtaagcatcaagcccaagctctttcatttcctttactagttccttggccagctcaacttggccaggtgaggaaggaatctgatcatgatgttcataatatgagcgagtattctttttagctaactgaataaaccgtttttcttcataatctaaattataaaaactcatatcatattccttcttacattaattccatcgtatcacttgaaactggctcagacttgggatctgaccaccacgactctttaactgttttgataattttaaaaccatgctttgcatacagcgctttagctgctatatttgcgctaaagacttctagcctaatcggccgtctaatatttggtaacactgaagctagcaattgatcaccaataccacgtcgttgaaattgaggatcaatataaaaataagctaaattatgtggcttatacgcagcaaagccagcaaattcattattaacttctacaatcctaatctcagaatcaaagaaattataccagtatggtgcttccttaaacggaataaaatatttctccactccgcctattttcatttcttgcaaacgagccgcatcatgaacccggcacaaatcttcgtaatctaaactttgaaaacatctagttcttacttgcataatttactcctttaggtgaaagagttaataaatttttatttttctttaattatacagaagtgaattatacatttaaagattttagttccaattcaaccagtcttcatcaaaaaactcaactttttcttcctgtgattctaatttctcttgttgcatcatagctattatcatctcatctttctatttttagaccattagttcgcatagaaattatatcaaacaaaggttcatctttctactctttttcaaaaaaatattaattgagttagtaatagatgtgaattacctatatttttatccacaatcgcgataatatcgggcttcagagccatgtttcacgtttattgtttacatttagctgtttttccaagtaatcaaatagcttttcactttataaaaattgtttcataaaaaaggatccaacttaatggatcccttaaacatgttattcgtaaataattacaggttcgccctttttaatattgttccaaacgcttcgaatctcacttggtttaacattaacacaaccatgtgagccaccctttaggtaagcggtcttgctccaatcagtccgccaagaggcatcgtgaaaaccacagccacttaaggtaaatggcatccaatacttaactggagaagcataacttgaaccatcatcattggtcccacgcaatgtacttggtgattccttatagtggatataccacaccccacgcggagtttgatcacccttagaaccttccatagtaccggtaacaacatcacgaagatgaacggctagtttaccctttttgatcaaccatacttcttgctttttcaatgatacaacagcataagtatcaccaatctctttatttgaataaccatagccgtgaggataagtgctgtagcctaaaccgtaaagtgcatctgcaccatcaaaatttttttggcctttggcaaatgcttcgagaagtaagcgttgcgtctttttaacataaacgccccaaccccaagtcttattctttaccgttatggttttgcctttaactttattgccctttggcactgtaaatttatagctcttgtgtaatgttgaaacttctttatcaatttgatttaacttagtcgttaatttactagtatcaccaaattgatagcgattatctcgataagtcacattattcaataaatctttggcctttaattgatagtttttgccattaattttataagtaatctctgctttgcttaagtcagttagtttctttttagctgtagctaaattactagtagtaaacttataagtctgagtcgatggaattttagtttgttgcttcttaaaaaaggcctttgtctcggactcatctaatgattggactgtagtgttatagctataaaccagtttgttattttttaactcaacttgatttttagctttttggttaactttagccattgccttagtaacggttagctttcctactttaactccatcgattgtaacattagggttaaagtgagttttagcatatttttctgctgcagcttgtgttgccacacggtgattatgaatgccaaaacccgcgattactccaacgataattaaaactgcaatcgttaaaataataatattgtttcgtttattctttttctttaggtcttcgttcatactatcctaccttttatgccagtaataatatctttaatatagcaccttgcaaatttcgtgtaaaatctattgatttatctaaccttttttataattagacgactagcatcccgcaaagcaaaatataaaattggtgtacaaattgcagtagaaattgaattgattacagttgcaggcaaactaacaaaggctccaactaacgctactttaaagctcgtccccaccattaaagcttcaacaattgaaacgcaataagtagtgaatatcttagttacccctgcaataatacctaaaataataatatttcttttactatcttgatagtgcattcctcgataaactgctgtcaaaaccgaagccactactactacctcaagcatagttaaccatgatgttgcggcatagccatttaacaaatcaaaaccacctagaccaataattcccgcaatcataccattacgataacctaaatataaaattgctacagcagttagcgtatttccaaaatgaataaatgggcgtcctaccatagcaggaacggggattcttaacacccagatcccaatataaataattgccgcaaaaagtcccgttaaaactaaagcttgtaaagaattcttgttttctctaaatatctgcattattaattattactccatctcttcagtaaatctggtaaagctgctgcataatttggtcctagacgtgaatcttgcttgggtgtttccctgattgcttgtgcaacaaaatcggccgcaattgaacacgctttttctaaattttctttatgcattaaagcagcaaaaaatgcacttgcaaacaaatctcccgtaccaaaataattacctgggagttttttctgaattaaagaccaactatgatcggctgtaattccaacttccgcaattttttccttattaagtgaaataccggtaattatgacattcgagacaccaaattgactagataattcagccgcaaattctgttgctgttttcaatgaattactagttgcctttttgcctaataaaaatgctgcttctgtcatattcggcgttaaaatcgtagccgacttaactagatttcgcatctttattacatagttttcatcaatgccacgataaagttgaccgtgatcacccattactggatcaatcaagatcaatttatttttttgtttaaaatagctaatcttttctgtccaaaaatctaatgctcttttgcccaaatagcctaagtatacagctgaaaaatcaaaaccaaccttttgccaatgggccataatcttagccatttcattattcaaacttaaaaaagtattctcaccaaagccacccgtatgtgtagacaaaattgcagtaggcaatacggtcgggctcaagccacatgctcctaaaacgggtaaagctgcactaagtgatacttgaccagcacaagataaatcttggctaactaatacgccaccattaaccatcttttttactccaatcaaaaaaaccctgctttaagcttaacatgaagtttaaagcatgaaaaattttattttgcgctaaatgtattagccttgatatgattcaaaatttgataaccaatttgtttatttctgttttcatcattttgagtttgatttaagaacataatcaaaccattttgattatctgtagtcatctgaatccagttaccaaagtgagtattatataagttaccatatgctaacttcaagttatcattattcttcatatataaaccacctgaataaccatttgatgaacgtgatgttaaatgagtcatataatcaaagtctgttcgactcaaaatttgcccattggttaaaccaagttgaatacggtaatagtccattggagctgagaacaaattaccagcacctaccaattgagaagcttgagtctttttaacatattgagcccattggtaattcttttgattccaggtatatgagataccatccgtcatcccggctggaatatcttccaagaaataagttcgctttaagccaagcttattaataattcgttcctgcacattttgcttgtagctttgtccagtttcttgacgtataattccagctaacaaaatatagttggtattattgtatgaaaaattaccaggttgattttgcgtagttgagtttagcttattaacaacccaattaattgcatcagcttctgaataaacacgtcctctatttacttcagtatcagctgctgtcaatccagaagtatgcgtcatcaagttgccgacggtaatattatcagcaccttttaaattaggataccacttagagatcttagtatactgtgtaaacttccctgcagaaattaattgagtgataattgcgccggtaattactttttgcaaagaacaaacaggataaactaccttactgtttcccgcacctaatcgcttgccataataaccataaccataagaaatttgttgtggttgtccatcttttactataactacggtaccacgagcataataactagctaatgtatttctaacaaagctccgcatttcagttttgttataacttgctgcctgaactgtcgagctattggcattagcaattgccattccaacaggcattgaagcagctatagttaaccaaatggttgatttgattaatgttttttttaaattaatacgtttcgttttaaattcccccagcaatgttatgtaaattctacccataatattagcatttatttttttcattggggttacaattttgataaagaatcaatgagaacgtatacattttctttttctaatatggataattatttaaatgatcttgatcagtaatctgacgtattactttagccggtacccctagtgccaatgaattatctggaatatctttagtaactaccgatccagctccaataacgcaatttttaccaatttttacgccgggacaaacagtaacattgctggctaaccaacaattatcgccaacagtgatagctgctccatattcaatatcggctatttttccgtctgattgcttgcgagcatttctttgagttggcaacaaaggatgcaatggagtcgcaaatgttacgttaggtccacacattacattatttccaattgttacgggacaagtatccaaaatagtcaaattgaaattagaataaaaattatctcctaagtgtgtaaattggccataatccacttcaattggtccttgtaaatatacattttgaccatgattcggaaaaagacgatcgataattgctttccgttctacctcatcttcatcagtagtcatgttgtaatcacgtgataagcgatgagctaaactggaaatctttttcagttcttcagtatctgggcgatatggtttacctgccaacatttttttagtattttcttccatcgataaagcctactttctaatttaatcgcttacttaaataaatcatgtctactagctgatgtccagcttcaaaaatcggatgatcataattttttacaaaaaaatctttgatcttacctgagcgtttaaaaccacatttttcataaaaaggaatagttaaggggctatcacccgttccaacttgcaaaatttgatatttattttgatacttcttagcaataaaattaatcaaatgtttagcataccctttaccttgatcttctggataagtggctatattttttatttctactgtattaccattttcaaccgtaataacacattcagatctaacttttcctttatcaatcaagatatacataattccacgttctaaatagcgatcaatcatactctcttgttcatcagctaacaaaagtaagtctatatactgcttcttattagattttatctctttaatttccatgattattttccaattaatttaaaattttcgtaaattgcaataataacttgaacacttttgtttaggctgtttgatagatgcgatctaattctctttcaaagatctcatctggtgtatgataagccaagatctttcttggcaatgaattgcaccaagtttcaatattaatgatttgttggagagagtagttatgaatatagtcacctttaggaatgaatctgcgaataaggccattatgcctctctacagtgcctttatcacaagaagtatatggatgagcataataaactagtgatttggaaatatcttccagctgagatagatccgcaaattcagaaccattatcagtcgtaatagttttaaagatatcgttccaatgctcgctgtattgcttgcgcagacttttaaaggcattcattacactggcagctgttttatctgggattttaataattaggaactcacggctcatgcgttcagacaaagttagcagcacttcgtcgtccttggtcttatggcctaaaacaagatcacattcccaatgcccaaacacatcacgcttattaacttcctgtggtcgttgttcaatactgcggcctagcttcttcttatttttacgaatgcgatgaattttggtattgcgcttgagtttctctggcaaatcatagttatggatgtttaacaagccttgatcgacataattataaagcgtcctagtgcagacaatatcgttgctggtaaattcccctacagcagtgcagcgattactgcaggcgtcgagcgaccagccatcttcaaaaaagtgctgttggacgtaatcaataaacttatgcttcttaagaaaatccgatttgcgtccacagtatcgacgattgttttgataaacactctgaccttgttgggctttataacgtttaactttaccgtgatacagcttaacagcccctcgtttgatctcatagtgaattgtactaggggaacagccaatttctcgagcgatggaacgcaaagaacaatgatctttcaaacgagtttgaataataacccgctcttcaagcgatagatgtgttccttttttacgcttgtccatgatagaatgtagtgagtccattttgacctccatagatgtttttgtggttattaacattctatcaaacaggtccaaatggacttttttattttgtatcaagtgttcaatttaattttacaatcggcaaatttaaaatttttctctttctactcatattctatgataaactcattattgttataaaaataagtataaacgaggaaaaaatgcgcaaaaaaaatatttattctatttgtatcggattaccgatctttttgattcttgcattctctattatggctcatgcaagttgggttaccggctttgacaatttctttgaaggcttagtccacagtattcctaatctgcagagcattatgcatgtaattacatttttagcagatactaaagttgacttagtttggatgctgttgatagctgtcattctttggctgaaaaagcagcgtcctctttcggcaagtattgtcatttcactagttacagctgatgcttttggttggattgttaaacatataatccaacgggcacgaccaactgctcacttagctgctgatgatggcttcagttttcctagtggccacacattaggaatggcgattattgttttctggctaatactaatattgattccagctttagttaaaaataaaactgctaaaatctggctcactgttttattagctatttggcttgttttagtaatgatttcaagagtttatctctacgctcactggccaagtgatgtttgcggctcagttgctatgggcttaatgtggattggcttagtagatgcaatttgggataaagttactccacaaacagacaaaaataatttttaagattaaaaatagtcgacgataagtcggctatttattttgggcaaaaagaaaaagtcactaaggaaaatgtccttaatggcttttctacaccttcaaatttcttcctatcagcagatgtcataagaaacatcttgcttagccttttcatcctcggagcgctcatcacacgctccgctactatgatatcaaataaaaataaaaagataaagatttttacttgataaatttcaaaaaaagtatatgaattattaaaaatcaaatttgtatattgctatcatttttaaccttttttagctccgatttaactgatttgcttttagcattgttaattgtcttaaaaaaggcggaaatttggccaatttctttttcggtagtcgaacaacagccacctattattctagcaccatgttcataccactcttggcttaactttttaaaatcgaattttgcattaaatggaatccaattgcgctcaaattcgttataaacgccacccaagttaggataaatgacaatttgtttatcagtaaaatcatgaattttatcaattactgcagttgctaaaaacggtttaaagcaattggctccaatcgcaaatacttgatcatattcattaagcttttgcactacccgctttaaaggagtgccatcactaattttagttgtatcatgcaatgtaaaacttacatacactggaatttccggagcattttcctttaaccaatctaagattgctacaacttcatccaatttaggctgagtttcaagtgcgagacaatcaggtttatttgccaataaaatcttcaatcgtggtaaatgaaaattaagatattcctccgttgttagagaataatctccgcgaaattcatccccttgagctaaatatgcaccataaggtcctactgaagccgctacataattatgaattcccgttgtctttgcaaaatcatcacgggcttttttggcaatttgaactgcattagtaatcaatttagtagcctggtcttgtgtaaaaccatgtttttcaaaagctgggatatttgcttgataagtatcagtaattgccatctgggctccagccttaaaataattcatatgtacttgataaatttgagcaagattatgttctaatgcaattgctgtccaaagttcattatttgtatcaatgcctaacttctcaagagctgtagacattgcaccatctaagattaatcctcgatcacggatctgtttgagcaaattcatttttctcaccttagtataaattgagtagatagttaatatatatttaatattgcattaatcttagatctgtttcaaatattatttcttcctatgtcttattttttagctacagtttgctataaatttatttaatgctattttcatataatattaaaatagatttttgaaatcatgtaaataattggccaaatagtgtgccgttaaactttcaggcttttgctttaattctaaaggcttaccctcttggacaatccgaccaccgtttttaccaccatgtgggcctaaatcaatcatgtaatcacaattgacaattaaatttaaatcatgagtgattgtaataatggtagctccctgatctaacaacttttgcattacttggaccagaaccttcacgtcaagaggatgcaagccaatcgtaggttcatcgaaaacaaacaatgcatcattttgtttatgactaagatgagtaacaagtttaaggcgctgagcttctccacctgacaaagttggtgtatcttctcccaaatgtaagtaatccaagcctacttcttttaacaattttagctctcgttcaatcttaggcactttaacaaaaatcggtagagcctcattaacatctagatttaggacatcaacaattgacagatcatgccacttcaccttttgtacatcttgattataacgatcgccatgacaggttgaacagacttgttgcatatctggtaaaaattggatgtcaagagtcacaattcctgtaccaccacaagtaggacaagctccttgtttattattatatgaaaaccaacttgatgtataatgcttctttttagcgagtggctgactagcatataactttcgtaaattgtccataattgaagtataagttgctacagttgaccgagtacttttaccaattggagatgcatcaacacttactacatttgaaattgggctagaaaatctactaatttgttttggcaatttttcactttggctttttgctataatagcgggtactaaactatccagaatcaaactagttttaccggcacctgaaaaaccagttactgcagttaattggtttagtgggattttagtttttacatcatgtaaattaaaatattgctttacttcaaataaaatagaatcggaatttattcgagtggctggctctctggcaagtagtttagcactaccatccaaatatggtcgaattaaagaatgttgatcatgtttgattgcagtaattgaaccttgatccaaaatctgaccaccttttttacctgaacctggaccaatctcaattacctcatcagcggctttaataatgtcaacattatgatcaacaactactaatgaattgccctgagcaactaactttcgtaaaaccttaattaatcctgcaacattagcaggatggagaccaatagaaggctcatccaaaacatataaaattccagtagtttcagtacgtaatgttcttgctaattgaattcgttgcaattcacctgtcgataaggtatttccacttctagccatagtcaaatagtctagccccaagtctaataatggttgcaaattatccaaaaactcctgaataatcgaatgagccattttatgcatattagttggtaaagttgcttgcacatctttaacccaggtaactaaatcacctaactgcatttcggccacctgattaatattttgcttaccgaccagctgttgtaacaattctggtttcaaacgactaccatgacaaagtggacaagtcgaataagtaaagaattcggctattcttttttgcgcacgttccgatttgctactctttgctgaacgatagacagcttgccgagcattttcatataaggcattaaaatcatgaaataccctgccagttcctgataaaaagtccattttatatttcttttcaggaccatttaagacaaaatctttttctttatcagtaagatctttataaggaatgtcgatcctaacaccagcatgttctgcaacgttaggcataaagttccgtcctggcaagctccaagatgcaactgcaccatctttaattgacaaattttcatccgtaatcagtttagattcatctagttgccgtatcttaccagttccgccacactcagtacatgcaccatctgaattaaaagcaaattgttcggcacttggtgcataaaattttacaccacagactggacaagttaattgtcccatttgctcacctgacatactcattgcctttgcaattgccaaacttggcttcaaatggtgtccattaggacaaactggagaacccaaacgagagaaaattaagcgtaaaacattaaaagtctcactcaaggttcctactgtagctcgctcatttggtacacttggacgctgccgtaaagctaatgcggagggaatatgtttgacgctagttacatcaacctgatttccctgtttaattcgcctacgcatataagttgacagagcatcaagatagcgtcttgaaccttcttcataaagaatccccattgctagtgatgattttcctgagcccgacagtcctgaaattgctacaaatttattcaaaggaatgtcaacgtcaatattctttaagttatgtactcgtccgccacgaacttcaattttcgttggaatcgtcattaaatatcccctttccattatttagtcattatctcttttaatctataatcatgaattaccaacaagcaaaccaatttttggaaaattatgacaaaattactattaaaaatatgtgttatatgatatattataagtagataaagtaagcgcttacttttgaaagacatagaaatgaggtgttgttgtgatattgattaaagaaaccgttgttttttcttttgatagatataaaaataccacatatttagagacacccatcaagctaggagtcatgcgtaacggcgcttgattcgtgtcctaaataaaaatgagggttacattttgtaactcttatttttgttcttaaaatacaaaagaaaatcagtacaaaacacggagtttgtactgatttttaatattctaaaggttaattatttaacccaatcgcggacttcactatcatcacgtgcaacaccaacaacattcagaccattagcccattctttaaagtgactgacataagccttatggttagtgcctgctgaggtaaagaatgatgcaacttcaccacggtagtttttcatcttttcaagtaatggcttaattggagttgcaggatagcctgaccaaacagggctaccgactaaaatcaaatcataattattaaaatcgatatcatccatttgaatttcaggataaggaaccttaccttgaatttgatctagagcaatatcgttggtcttgtacatatctgaatcaaaagcgtcaggagcaacagttacttcctttaattcgctgttttcaatttctccgttaatctttttagccatgttcttggtattgccttcccaagaataatagataattaatgtttttttagccataaatttagtccttctttcatttacatttattgtaataaaaaaagaccggtttgaccaatattttaatacgcgtggtgctagttaaatcgttttagttaataactgaaaattgaaagcaccaaaatcaagctcaagtcctgtcactattgagctttcttagacgtaattagtttttatatgatctgtttcagtgcaatttgtatgaatcgtggcagttggttaataaagtcattgattacttcatctatcttttcaaaactattctgtttaagctcttttaattctgaaattaagtagaccaatgcatctacgaatctaatatcaggtaaggattcgttcattagatagaataaatctccgattgtcttatcatctgtattttgtctttcctgccaggtcaatagatcataagttattgctgtaactgcgatatagccacattggccatcatagctttgaacttgagatttatctaaagcaagatattgcttagacgtcttaaaatatgtttcaatttgccatctacgaccataaagttggatgatttcttcagggctaagctttgtctgagtagtagctaaaaccaaatacttgttcttgtttccacggttggagacaaagacgagctttaataaaaagctatgtccatgatattgagcctcaactatgcttgaataaagataatgtttctttttacggatgtttgaagcagccaaacgatcatacaagtctttaacgctatagcggcgatggcgataaatgtaataaatctttgaactcttcttgatcatgccaagtccatctaaaccgatcttctttaaaatccaaaacattcttggagaagaaaaccaagaatcgaataagacgtatttagcttctactcctaatcgtaaggcttgtctaatcaactctacagttacatcattcatctttctctgagcttgatttctccttttaccagaaattgaacgttcatcagcagtaatgggagcagctccaatcatatttttcttggttttggttgacatcaaggcaaagttaaccggcaagaaggtattgccatcgctccagcctaaagttaaaccacgatatccgttcaaatactcatgcttgtcatggtcatagactttagctagcaattcggtctttttagaaaaagaccgagccatcagcgtatcgtcaacgataaaagcaagtcggcgtcttttatcgataaatggttttaagcagccaatgagccgggctgcaatcaagcataatagtttttgccagttgattcttccatcgttaagtacattgcgagcagttctaacggaaaaacgtttgtcatccttagctctgaataaagaaagccgagcaaaatgtactgacatcagccaagagataatcatggttaatgaaacggtggatttacgcttaaaattgacttgtttagttaacttagctagaccaattagattaataaatgaagaaattaaggatttagtatcattttctgtgtcgatttgttctatactgttcattgcgcaggatctcctttactttttaggtcgacacttaaagtataacgcagagagagcctgcgtttttatttttgataagaaaaagccaagaggcgcggggaaggagcgttaatcttagctttcaagttttagttaataaaaaagtccaatcttgttagactcaacttgtataataatagaaaagagcctgatctgattgaactgccttaagcttaagcgttttagccaccatttacaagttagttttaaagatttagtgataatttgtcggcactggtatcgtttgtatgcaccggctgagtttactcatcggcgaaatattgatcaaattaaaactacggacagtctgattttggctttacttatctggcaagctaagacaggaattgaatcacaaagaagattctgtgaatgtttcaattgtttatcacactcacgttttaatcggcgttcacgtcagctattgcaattgatttatcagatacggcaagaaatgaataaaaaggttgacctgaatggacagttcttgatcattgacagctttccggtacctgtttgccaaccaattcgcaactatcgtgctaaaatttttcgcggttatgccaacattggttataaggccaccaagaaaatttacttctatggtttcaaagttcatgccattgttagcgatgacggttccattcttgattatgtcgtaacaaaagcatcagttcatgatgccaaggagacagttgaactgctggaaaatgcccatccatctaattactatcttcttggcgacgaaggctatttaggcaaagaactgcatcaacagctaaaacaaatgggttatgaactttggacaccatatcgtaaaaatatgacaggagctaaaaagcacaatgatcatcaattgatggctattcgcagaacaattgaaagcgacttttcgcttctgatctattacaatgccgagaacaatcgagcacgtagtctgataggctttcaaagccggttggaaattgcaattttagcttataatttggcttattgtctagaacgatttaactagcaccacgcgtattttaatattattattttagctattttccttttcttttgattatttccatcatagcctgaccatactttttcatcttcgcttgccctacaccacttacctctaaaaattcactttcattttgtggtttaatttgtgccatatcgtgcaaagagcgatctgaaaaaatcataaatgctggtactttttgctgcttagctaattccaaacgcttttgtcttaaagcttcaaataaagtatcactttcttcaccagcatgagtagtagttactgaaatcttagcaattcgccgtttgactacagttttgccatctagtacatcccacccatgattagttacatgcactagtggatatttgctaccttcaacttctagataacctgaagcaattaaatagtcaatcaagcttatagcatctttttgcttcattcttagagagccaaaagacttatattgtgtagcattcatttcttgcatgcgatgattttttgagccaatcaaacattgagcaactatcgtttttccaaagcgaccatctagttcataaaccatactaatcactttttgagcatcaatggtaatgtcagtcaatttatcctgatttagacaatttgaacatttaccacatggcggacaatcttgaccaaaataacggacgataaattgctgcaaacattcaccagtattagcataatcagtaattgtttgcaacttacgatattgcagttctcgatatttatcatccgcatctgattcatcaataaagtagcgatattgacgcaagtcaccaggatgatagattaaaatcgctttgctttcttccccatcacggcctgcccgacctgcttcttgatagtaactttccatattacgggcacttgaggcatgaatcacaaatctgacattacttttatcgatccccattccaaaagcattagttgctacaattacttgaaattcatcaaattgaaaagcttcttgtacttgacttcgttctgaagaatccattccaccatgataagcaccaacagagattcctttcttagccaaataatctgtcaaactttcaacttttttacgtgtattagtgtaaataatccccgctttatcctgatgtgccttaatatattctgaaatatataatggagtattttgtggtgagttgaccactttaaacgatatattagggcgagcaaaagaggtaacaatcatattctccttgggaatattcaattgttcacaaatatcatcttgaaccgcaggcgtggctgtcgctgttaaagctaatatatttggtctgctttttagtgaattgattccatctaataattgacgataagcaggtcgaaaatcatgtccccattgtgaaatacagtgtgcttcatcgacagcaactagatcaatatctaaaaaatttaactgatatctaaaataatcaatcgctaaacgctcaggtgtaatataaattaacttaattttgccttcatatgcctgacgtaaaattggattaacctcttcttgcggtgtagtagaatttaatgctgccgcattaattccattttgctttaaattatcaatttgatctttcattaaagaaattaatggtgaaataaccaaagttacaccggaattaatcaaagctggtatttgataacacattgattttccgccaccggttggcataaccgctaacacattttgcttttttaaaactaaatcaattacttgtttttgacctgggcgaaaatttgtatagccaaatgtatcttttaaaacttcttctggattcataaacttatcctaactagttaaattgctactttttattctaaattaacaattcaccccaaacaagataaaaagattcacacttttaaataaagaaaaatgtgaatcttttagagttaaatttacttataaaatgtttcttctactgcatgagtaatcgcaatcttatcatgagcataggacaaaccgccctgaatataaagcatgtatggttcacgtaaagggccatcagaagaaagctcaattgttgatccttcaacgaaacttcccgaagccataacaacttcatcttcgtaaccatcctgatgatatggaattgggtcaacaaatgaattcattggtgaatagtgttgaatagccgcacagaattttaccatcggatcaggtttaccaaaagtgacagtttgaacaatatcactacgtggatcactccatttaggtgaaacctgcatccccatttcttctaataaggctgcagtaaagaccatacctttttgagcttcaccagtagtatgagctgccataaagaatccttggtagatatcgcgcaaataaccccaagttgcgccttcaccttttccagctcctggcactgtcaaccgtgaaccagcaccatcaattaaatcctgccggccaactaaaaaagcaccgccttttactaaacctgcaccagcattcttataaagggaaccagccatcatatcagcaccataaaaagttggttcttcacattcagagaattctccataacaattatcaataaaaatattaacatctggacgaacttctttaatgaacttaagcattggcttaatcttagccatagtaaaagtcttacgagttgcataacctaatgatctttgaattgccactactttaattgaaggatccatgatatcttttttagcttggtcgtagtctacttccccattcttcaattcagtagtcttaaaattaattccccattccttcatgttaccgggcttattaccagcaagaccaattacttcttgaatggtatcatatggcgttccagttaaataataaagggtatcccctgggcgaagcatgctgaaaagaccaactgtaattgcatgagtacctgagccaaattgtggacgaactagagcatcatctgttttaaaataatcggcataaatatcctcaattttatcacgacctatatcgtcataaccatagcctgttgatggaactagatcttcttcaccaacatgatgttttctaaataggtccaatacacgttgttgattatacaaaacctgttcatcaattttttctaaacgaggttggatcattttttcaactttagtcactttatcgtttaactcttttggtaaattctctttccaagaaaaactcatttttaactccctatttatttttgattacttctgcttgtacgcataaactaccattattattttcgctcagatatactccctgaatctctggcacaaaaccaggaaacttttcaatagcatgcgccaagacttcaaagtacttttgatctaccgttccccacttttcaccgggtgcaacaatgaaaacacctggaggatatggcaaagctccttcggcagcaattcttccaacaacattttctaggttgaccagttcattttgatcttttttaaaaagctgatcagctgtagctggtgtcatttgatagtcttgcatccctgatttagaaaatagcttttgctgtaatacaaaagtattattttcctgatagtactcatgcatctcttgacacaactgtttcagggtatagccttgataacgctttggatactcattatataaaaccggcaaaacatctttcattaagtcatcttctagatagtgtttttcaaaacttaaaaaagcttcaagtaaagtatctagttctgcttgactatctcccggtgtaagtaaaaacaacaatgaattcaaatcatttttagctcgaataatatgattttccattaagtattctgccactaccgcgcctggaatacctgttttctcatattttgcatttttaacatcaatcccgggagtttttaccgtaatcttcaatgggtcaatcattgcttcgcctggaaccattttacggaaaccgtgccaatccgtattttgtcccatttcccaatattctgcattggtagccaattcatcagtcgaaatttcggcaaaattgtcaggaactaatggcttaaatagcttagactttttgagtagttttttccgccattcaattcccattcgcagagtttgatcccaccactttttatttcctgctccagcagtaacgtaggaattaactgttaatgaagcataaagtgggtatgcataactggaagtaacaaacttcagataagcatgattaaagtgcttatgatcaacatatcgtttttgtcctttaatatgagcatccttttttagaatctgtgacgcttgagccatacctgcttgctgtttatgtaatgactgagtaaccaaaatacctggatcatcaggacccaagttaagtagaagtggtgataaatgtctcataattggcacgaattcttcaaagccgccccaggcacagtcaaacagaacataatcacaaagtttaccgattcggtcaataatccactgtgcatcataaaagactccatcataggtttctgcttgtacgattgttaacctaaatggacgcttagcctttgcctttgccggatctatcttagctacttcagctctaattttatcttcagttaagaaggctggatccatttctccaattagtccaagtgcatttcgatcagttggaatgtagaccggctttgctccgctcattaccaaggcagaattatacaaagatttatgattatttcgatcaaataaaactagatcgccttcagataaaagtgcacttgcgcaaatagaattagctgaagtcgttccgttggtacagaagtaaaccttatctgcatgataagttttagcagctttcttttctgcattaagtggcgttccagcatgcgtcattgtatcccctaattgaggaacagtatcacttgtatcggcaaacattagatttttaccaaagaacttattaaaaactactccggcaggatgtttgtcataatattgcccattatggtgacccggtgtagtaaatgaaattggttttgcttgagcaaaattgatcaagtcggtcaaaaagcctggcaccatttgcttttcatattctgtagctttctgagtgacttggtcttcatctacctgatcagttactttaatcaatggaatcggaaagccagattgttctcttagagcttctgcttgttttattcctaatgcatcatcatttttgacaacaattgcggcaagttcagcactattttgtacatcgccaattggaattgacgaccaacctttcatcttattaacattgacgccatttccaatggcaattttcaaaaaatccatcctttttctttccattttgtccacgaaaccgttttacatattgcaaaactttaaaaagtctttataatttttctacagtatagcgtactttttgcattctttcttaaaatacgctacagctgaaattattatataaatattggaggtttttaacaagtgcatttgccttgctcgcctccgagaacagctatgtcaacacaacaataaaatagcttaacttggaggaatttttatgtcagaaacaatcgaaacagtcaatttcgaacccggcaaaaaacactacatgtcatggccggttattgcattgatcgacttcgtaacgattatcagttttgaaaatattttttatccatttcaaaatcaaggcttatcagtagttgtatcttggattttcctactcttcgcctacgttattccttatgcattgatgtctagtcaaatgggcctaacctttactgatcaagccggtggattggcatcttgggtacgtcattcatctaacgatacactgggctactggacttcatggatgtattgggttcaaactgttccttatttggtcgatgtttctaattcagttattgtgtccttttcatggattattttgggcaacaatactttagacaagcatatgtctactttttggtttgggattttgacctttgtcattattcttgcctttattttggttgaaaatgcaatcaagaattcacttgaactactatctttaattggtggtggtgcaatgtttattatgtctatgctctttgttttacttgctgtttggtcagttatgcatggacaccatattgctacccaaccatttaacttggccgcatttaagccatcatttagtttacgttacttttctaccactggtcttctaatcttcgccatgtctggtgcagaacttgctgctccttatatcgtacaaatgcgcgatccaaaacacgaatttcctaaagcaatgtggatgttggctttgatgactggattcttgactatcttcggtactttggctttagcaatgtttttcaatgctcatcatattccacatgatttcaagatgaacggaccttactatgcatttcaactactaggcgaaagccttggttggggcaaagtattaatgtacatctttgctgttgttcaagccctctttatgatggcccaattagcagttttacttgatgcatcaagtcgtgtctttgccggtgacgttgccgacaaattcatgccaaaatggttaactgggaaaaaagacaaaacaggtcgtccagttcactcgtacactttaacttgtggtttagccttattcttgcttttacttactgggactttgccaaatattaattcaatttacaattggcttttaaatatcaatggtattatttccccatacaagacttgttgggtattcttcgctttcattatgttacggatgcaccaagagaagttccactcagattatgtcttcattaaaaataagactggtgcccttatcatgggctggtggtgcttaatctttacctttatctgtgctactttaggatttattcctcaagaagcagaagcaacattcggtagcgcagcctttaatcaccaattaattatgaatattattacagttatcgtactctttggcttaggcttcttactaccatacttaagaaaacgcgaagaacgtaaagaaatgaatatataaaataaacatgcttcgatcagttcgaaaatcgaggcatgtttattttattattctaagatttcaacctgcatcttactaggaacattaacaaagtcgaattgtttttgaaaaacatgatcaaaccgtaaatcataaacagaaccaataattggtgttaatgcaaaagctcgtaaagtgttcatatctttagttttattagcataaatatgatgcattggtggtttgattttataaattcgttctaaatattgtggacttacctcatcaacatagccttctagagtgaaaccaatgctagtgagagtttctcttccgcgcaaagcggtaattgaaactttattgtgtcccttaatatggcgataaaatgacttctgattagtcgttgcaaaaatcagacgaccatcttcattaaagtcaatatcgataatattggtatgtggatcaccattttgatcaacggtaccaaaaattactgaatggaaacaatcaacgattagatctaggaattcgtcgttacttaaattgcgatcgagttcaggaacatgttgtctcataataatctttccgtttctatatactttctgtaatttttatctatattatttcttatagtgtacatgacacgattaactaaaaacaactttaatgctcattattttcccattttaaatgtataattgtttaatattaatttttctggtaaaatttcagctaacaaaaaataagaaaagaggcagaatatgaatttagactataagaaattggcccaagccaaaaaggacgacattcttcgtgatcttgacgaattaatcgcaatcgactcatctgaggatttgaataatacttccgaagagtatcctgttggtccaggtccagttaaagcaatgaagaaattcttatcgtttgcacagcgtgatggtttccatatcaaaaatgttgacaagtacgctggccgtgtcgactatggtactggtgaaaaacgtttaggcattattggccacatggacgtggttccagctggtgacggctgggtaactgatccttttaaaatgttaattaaggatggtaaaatcattggtcgaggttctgccgatgataaaggtcctgccctagctgcatattatggcatgcttttacttaaagaagctggatttgaacctaagaaaaagattgattttattgtgggaaccaatgaggaaactaattgggttggcattgattactacctaaaacatgagccaacccctgatcaagtattctcacctgatgccgaatttccaattatcaacggtgaacaagggatctataccctgaccatgacctttaaagatgacaataaaaagggatcagtaatccttaagtcattcaaggccggcattgccgaaaacgtaactcctcaaaaggcctatgcaactattgttggtagtgatttagccacaatgaaggaaaaatatactaagtttttatcagataataaacttgaaggcgaattcactattgagggcgatgaagctaagattgaattaactggtcaaggtgcccatgcatctgcacctcaagttggtagaaatgcggctacatttttggcagtatttctagatcaatttgattttgctggtcgcgataaaagctggcttcatttcttagccgatgttgaacatgaagactttaacggcaaaaaattaggcgttgctcatcatgatgacttgatgggtgatctctcaagtgctccatcaatgtttgactacgaggaaaatggaaatgctgttttgaaagataatattcgctatcctcaaggtactgatccagataagatggttaatcaagttgaagaaaaatttggtgatatcttaattccaagttttgcttcatttgaagaacctcattatgtacctggagacgatccattagttcaaaccttgctcaaagtttatgaacgccagactggtaataaaggtcatgaagtcgtgatcggcggtgggacttatgggcgtttatttaagcatggagttgcatatggcgctcaacctgaagatgctccaatggttatgcaccaagcaaatgaatatatgaaggtagatgacctaattaattcaattgcgatttatgccgaagctatctatgaattgactaaggacgccgaataaaaatttttacatgtatcaaaaaagcttatatactgatcttgttttaatgcagtatataagctatagaaagttgctagtgtcatatatcactagtgacttttttatttttccaataaaacttcttcattatttttcttagattttagccaaaaatgatgtcccaagtaacaaatagctacaaaaggaattgtatagtacaatgctactctttgggttggatcgaaccagattaatacacaagaaagcaggcttgatataaatgcaaaatatggaattacaggataccatggggtcttgtacttcaattcactgagttgatgacctgagtttaaaaatgcccttctaaacttcaattctgaccatgcaatcgccgtccaaacgaatacaacagctaatccagaaatagaaactaatactagataaaccgtcgaggcagcaactttactagaaatcaaagcaaaaattccgtctaacatacttactactaatgacaatactggaataccacgcttattagttttggtgaatgctttaggaattgttccttcgttgcccaacgaccaaagcattttagttgaagcatacaaacctgaattggccgcagaaataattgcagtcaaaactacgaagttcataatatttgcagcaaatggcacatgaattaggtcaagcacatacacaaatgggctttgagttactccagccgtatgataaggaattaatgcggccataactacaattgagccaataaagaagataattaaacgccaaagtgttgtcctgattgcttcaggaatagctttctgaggattctctgcttcaccagccgtaatgccaataagctcagttcctgaaaaagcaaagtttactgttagcattgttgtaaatactccaccccagccgttggggaaccagccatttttataaaaattaaccaatcccaatgtgcttgataaactttgctcaactgatcaatcaaagctgttgcggtccataatttattattagtatctacgccttgtttttccaattcatacgacattgcaccatctaggactaatcccctatttttaatctgttcaagcaaacccatttttttcatgctgtcaacattattttagtaaatttcctaaataatagccgcaataaactagaaccaagccacccagatatgatgacaccgcgtagaatacaagaccacgataatttttactcttataaagctcaactaattctgtattcatagtggaaaaggttgtatagccacccattactccagttcctagtaatgcataaataaaagtgttagcaccaattccaaaaatcaagcctaaaattagtactccagttaagttaataaacaaagtcggtgtaggtaaattagaaaatttattaccaatccattcccaatgctttttaccataattagtaatagcataacgaagcatagctccaattgatgcaccaattcctgcaagcaaaaaattcatcgtgtattcctttcctttcttactaattgaccaacttttttaccaattttcattcctaacatagcaaaaaaaaagccaaaaataattgagctaaagtaataaattactgcttcgattggcaaattagcctgcatattttttaaaacatcaagattaaaagttgaaaaagtagtaaatgcacctacaaagccagtacctaatccaactacaagccactgcctaatctctttagtttcaataaaaaagtaggtgaaaaacgctaataaaaagcaacctatgacattaccccaaaaagtaccataatagctgaagtttgcatttaaaccagcacgtgccataccaccaaaaaaggcgaaaatagcgatactaatgtaattaataaattttgaattcaaacagattcctcccacaaaaaaacgtctactttacccctatcggataaagtagacgtcattagattttactcggttaatggcgaacgtcatcgcctattcagttgacagttatcatcatacgacttttctgtttggttggcaagttgtattgtgtgcgtgtcgcaaagcgacacgcagtttgattatttaataaaaaaatttagtaacaacgtgcttgaaataatgtataattatttttaacgaatgtttgaaaggagcctcaatcttgacttttccatatgaagataaatttcgcatttactgtaaacaacaaaagaaactagccgattcaactatttctctagcctgttcttcaatttcaactttttgggattattattctggtagtttagatgctactgaagcaaatgtagaaaatgttacaactggagatatacgtaactttttagattcacttgaaaataaactccatatgaaaagtaatacagtaaataaatatcttagtcacataaagatgtattttgtttttttgaatgaatatggctacatcattacttatccattgctcactttacgtggtaatcgcttcaatcgtaagcaacactatgttattggctgggaaaatcatttatcagaattaattcaaataaaaaatattcatcctgaaactatcaagatgatggctgctattgcttgtggttttaagccaaaagaaattatgattttgcatgtaaatgaattgttggtaaaagttaaagaaaatgatgtcagagaatatatccaaaatcacactaattttgccaataacgataatccctatctgtttgctcgccgcgatggcaaacattacgcttctgattttaatattaacccaaaaattgcccctgaccgttcaatagtcggcatgccattaactacacataagcttcggatgtcttatgtctactctgttttgtctaattcaaaattaagagaagcggattatattgaaaaattacatctttcaatgaaaactttaaattactatcgtaaaaatatgacactctatgtagaaaccagtaaatttgaattaaaaaaataaacaagcaaaaacgactacccattttgatatagtcctactttagtagacagtacaaatatataaaattgtactatctatgaaagcaggactttttgtatgtctagaaaaagtaaatttagctatgaagctaagcttaaagcagttaaacaatacataagtggcgaagcatcacctgcttcaattgcgaaagttttaggggctggcaagactacactgcgccaatgggtatatgcatttaaagatcatgggccagaagcattaagaccacataaatataatcaaagatacagtaaagattttaaactcaaatgcatagctgcctatttaaatggcgaaggctcatatgattatctaacaaataagtttggtttgcgaagtgctgcacagttaaagcagtgggttatcaagtataatagtcatcaagaactcaaggactacaatcctattctggaggcttatatgactaagagaaaaaagacaaccctagaagaacgtaaacagatagtgaaatactgcaaggatcatcaatggaactacaaggaagcagctcttaaatttggctgcagctatgcccaagtatacaactggtcaaaaaaatacagcgcaaagggaactgacggcttagcagataggcgcggtcatcgtttaaaagaagctgagctatctgaaactcaaaggctaaagcgtgaaattgaacagcttaaaaaagaaaatgatattaaagaccaagagatagccttcctaaaaaaagtgaaggaattagaaaggatgtgtttgctggacagccaaaacaaagacaaatagcacttaaacaacagcagcgaaattctctttacagtttgatcaaagaatgtcaccgagaatataagtggtcaattgaatggatgtgcaaacaagccaatattgcccggtcagcctactacaaatggcttaatcataagccaagcaaacgtgaactaagagatcaaaagattcttaagcgtattaaagaaatagctgagagcaataacagcctctttggttctcctaagatgactttggctttaaacaatgagctagcagacggtgaggccaaaatataccgtagaactgtggctcgcttgatgtgcgtgaatggcatctatactagcaaggccagatttaataagaggtatcgctatcaagctgctagaccggaagaaactgccgaaaatctattgcatagagacttcaatgccactaaacccaatgaaaaatggtgcactgacattactgaagaaaaaattcctggaacaagtcaaaagatttatctctgtactatctttgatctatatgatcgtttccctgttggctatgctttaagcaagcgcaatgatacagccctagttaacgctgctctgtcaactgcttggaaaagagagcccaatagtcatgcaatgcttcatagtgatcgaggatttcaatttaccaggatgccttttaagcatgagctagaagaacatggcatgccacaatcaatgtctagaattggccgctgtattgataatggcccaatggaaggctggcaaggtttaattaaagaaatgcgagaagttctttatccgaaggcaaatagctatgaagagatggaaaaagcctttaaagcaagtattgaatactatattaattatgatcctcaggagcgcttcaatggcaagagcgcaggtcaggttagaaaagaagctaagaataatccagagaatataatttcatatccaataaaacaagataaaagatataaagacttttggaaaaagattgatgaaaagaaaaatcagctcgcacaatagcgaactgattaatcaaattaatttatatatttaagctgtctacttgacacggtacggatcatttcgagtagtcgtctttgtttgttgaaggtgaaatttcaacaaatctatcttagtcagaacttggagttatctattagtaccagccatttgcttgccagaaacttttagcagcgctccaagagccatatctagatttgacataattatccgctacacgttcttggttagcagctgaataatcaccattcaaataagatgaagaaagttgatacttacctacatattggccatttctagcactgtatgagccaccagattctttgcttgcaatccatgcctttgcactagcttcggaacctgtcgcggttgatgaatatgaactagttgttgtcgtcttaggtgtgtagttcacatttgaataagtgtatgaactttgactttggctagcttgtgtagtttgttgagctggcgtttgtgtttgagtgtaggtattttcttgtctagcttgagtattttagctagtagtataattagttgccaatacccattgatttaagccaagatcataccacttctgtccctttgaatcataagcagtttttataatcttccagttagtacctgcagctagagtttgaccagttgcaactggattttcatagttattgtaaacggtagtagcttgtgtagttgtatacactgctgcatcattttgcacaacggcagcttgtgcttcattattatctagttgattgattgcaccaatacctgcaagtgataaagcagcaacagcaatagtcttagttaaaatagatttagttttcaaaaaacatctctccttaaattaaaacgtcaattactattcatcatttttgttttattattctcttgcaattgacattttatataatacctgcttcgagttgcagttccatcacagtcagatcacacaatgattaaagaaaaatgttttttcgtaacagttggaaatatttttaataaatctagatttctctgcaatatttgtaaaaatcatgcaatatatgaacaaaatttgacgacaaaataagcatccctacgccataaaagatcgttttagggatgcttatttaattaataatctaattcttgatccatacttgcaggccagccaccaataccacgtttttgatcaaggccacgcaatgtctccatctcttcagcagtaaattcaaaatcaaaaatatccaaattatccttcatgtgtaacggattcgtcgagccaggaataatcatgatattttcttgtaccaagaagtgtaacgcaatttgtggcactgtcttattatacttctcagccaaagaaagtaaggttgggtcattaaataaagccttcattccttcaccgagtggtgaccaagattcatgtacaatattattttcaattaaatatttatgcattttcttttgttgcttaaagacagacgtttcaatttgatcaactactggcttagtatcgaaattattcataatttcatttacttgatcatggttgaagttactcagtccaattgaacgtagctttcccgcctgatatgcctcctcaagtgcctggtaagtacctaaactatcagacataggccagtgaataatcattaaatcaaaatagtcttgctgggcgtgaattaacgattcatcaatcccattcttcgtctctctataaccacttgtttgcgctttagtggtcaaaaaaatgtcttcacgtttaatgccgcttttgttaatagcattgcctacttctgcttcattactgtatgcttgagcagtatcaattaaccgatatccagccttcaaagcctcgacaaccgctccttcagtaattctaggctgaattctatatgttccaaagccgaagattggagtttttacaccgttattaaaagttaaatatttcatttttattcctcaatattttattcaggatcagatgcagagtgataagtaatactaaatccagcttgatattccttacctggctccaaatgattcataccatatttgtgctctagctcaccatcagcatcttctctatctgcaattccccaccatggctcaatgcatacataattagcggtatttggatattgtgaccaaatgccaacatatggtgcatttctagtccaaacattgatgtggaacttactcttatcagttctcaaagatactttattgtcatgaccatgtaattcataaatcaaggcatcatctttaaatagctcatcacttaaaccaataaaactatcagtcgaagctagagaacgattattccagtcaagatatgctcctttaagtgggatttttaccctagcaatagatggatgcatatcgaaataataatcttctttctcttccccattatttactggtaagttaaatccagggtgaccacctacaccaaaaatcatagtttcatctgatttattaactacgctaaagttttcttccaataaattattcatcaaattatagttaactctgaattcaaatttaaatggatacatttcacgcgttttttcattatctttcagtaagaacgtgatactttcttgtgtatgattctccacttcaaaatcacaatcacgggcaaaaccatgctgacccatatgataggtcttaccttgatacttatattcatcattcttaagtcgccctacaattggaaaaagtacaggtgcatgtctgccccagatctctggatcagcttgccacatatattcttcaccggtatgagctcctttaacgctctgaacttcagctccgtgatccgaaatcactacttcgatcatattattcttgattgtgtaatccataactaaatttccctctacatatcaaacagttaaaaatcataatgtaatcgcttaattacttatattttaacattaatgcgtcaataagccagaataaaaacaaaagaaaaaagcattcaaactttgaattgaatgcttcattcgtgattctttgatcaattagagaataaatttagttaagtctttattcataataatatcgcctaacttatcttcaacataggcttcagtaactgtgatttcacccatttccatatcaggcccttcgtaaagaacgtcttctaagagcttttcaagaatagttgaaagtcgacgagcaccaatattatcagtgccttggttaacatcaaaggcaatctccgcaattttatcaacggcttcttgggtgaaaactaacttaatgccatctgccttcattaaagcaatgtattgcttaagcaatgaattttgtggatccttcaagatcttgacaaaatcgtccttggttaaagcgttaagttcaacccgaattggaaaacgtccttgaagttctggaatcaaatcactaggcttactttcagcaaaggcacctgcagcaataaacaaaatatgatcagttgaaactgggccatattttgtatttacagttgagccttcaacgattggtaaaatatctctttgaacaccttcacgagaaacttcaccagaattacgtttattaccagcaataattttatcaatttcatcaataaagataattccgttattctggcttctttcaatagcatgttgatagatagcgtcatagtcaactaacttacgtgattcttcttgaatcaaaacttcacgtgcttcttttactgataaagtacgcttaacctttttcttaggcataagatcactaagcattgagcccatatccatccccatttgacccatcatgtcactcattgggttggccttaggagcttgttctacctctatggtaacttcgtgatcttcaagtaagcctttagctagcttttcagccacatccattcgtttgtttcttacatcagcagaaacatcctcttcatgatcttcttcgcgattattttctcccatcaacatagacatcatatcttgcatttgctgcatttgattttcacgacgttcatgtttctctgctggagctaacaaacgaactaattctttatttgcttctttagttgcttgagtctttacacgagcaaattggtccttttcttccattcgtacggcttcggaaaccaagtcacggaccattgattcaacgtcacgtcctacataacctacttcagtaaacttcgttgcctctactttaacaaagggagcttctacaatatcagctaaacgacgagcaatttcagttttacctacaccagtaggaccagccattaataaattcttaggcgttacttcacgttgcatttctttagataactgcattctacggtaacggttgtaaagagctatcgcaactgattttttagcttcatcttggccaataatatattcgtttaaaattttaactatttcttttggggtcttaatagccatttccttcactcctaaatttcatcagtgacaattttatcatcagtgaaaacatcaattcctgaagcaatctttacagcttcatgtgcaatttcatcggccttcatatcttttgcgtgtcgagtcatggcaatcgctgcggcttgagcaaaattaccacctgaaccaattgcaactacgttttcatcaggttcaagtacttcaccattacctgaaattaaaagtaggtctttgtcatcaaaagcaatcaacattgcatttaatttttgtagagttggatccttacgccatgcttgagccatttccacggcagcacgacgaagatcgcctgagtagctttcgagcttgccctcaagcatatcttgaaggctgactgcatcagctacaccaccggcaaaaccaattactacacgatcatggtaaatacgacgaatcttacgcgctgttgccttggcaataactttttcgcctaaggttacttgtccatcaccggcaattgctgtttttccattaaatcttactgaacaaattgttgtcatgttaaacctcaactttctttattacgaggaaaatatttttgataatctgattttaaatgagccattgttacatgagtatagatttgcgttgctgatagactactgtgtcctaataactcttggacacttcgcaaatctgctccattattaagcatcgcggtagcaaagctatgtcgcaactcatgtgggtgtactttaccactaattcctgcctgattaaaagttttttgcattacagtttcaattccgcggctagtaatgccagttccttgattatttaaaaatacatgctgttcatcatcatttttaagtaataatggacgtgcattttctaaataagcaatcaaagatttttttgttttatcatcaaaagcaacatagcggtctttatttcctttaccgtgaaccaaaattgtctgtaagtctaaatcaagttgattcaaagtaagattactaacctcacttacccgcatccctgtcgcataaaacagttcaaacattgccaaatttctcatcgtcaaaggcttatttcctttcaatgaatcaaaaacctgctttaattcaggctggtaaaaaaattgcggtaattttttctcaccacggcgtaaagtaataccctgagttggatcgattgccactagtttgcggcgggttaaaaagtggtaaaaagaatgcaggctggacatcttgcgcaactgactactacgggctaacttgcgttctgctaaatgttgtagataaacctggatatcacgttctcttactttagtccaacctgggaatccaccattttcatgccaaaacctttccgcttcatgcaaatctgtttgataagctaaaacggttttcgcactataatgacgctcattttgtaaatatgataaaaattgatctaactcactttgcctttggttcattaatctaaaacttccgtcttaaattcatctaaactagcaagaccacgttcactgaccttctcatggcgctcacgcttcttgcgaatcttcttaccctctagtggaggtagcaaagcaaaactagcattcattggttggaaatgtttagcactcgtagtagttatgtagttagccattgagcctaacgcagtatcttttgggaaagccacagtatctttccccatagcttcacgtgctgcattaattcctgctactaagccactacctgcactttctacatagccttcaacacctgtcatctggcctgcaaaaaataatccaggctgctcttttgcctcgtaagaagctgtcaaaacttctggtgaagccatataagtattacgatgcattttaccataacgaacgaaacgtgcattttctaagcctgggatcattgaaaatactcgtttttgttcaccaaatttcaaatgagtttggaaaccaacaatattatacattgaagctgcagcattatcttggcgcaactgtacaactgcataaggagttttgcctgtatgtggatcttctaatcctactggtttaagtggaccaaaaagcattgttttagccccacgcgctgccattacttcaattggcatacacccctcaaaaacatcgctattttcaaaaccatgtaattgcgcagtttcagcgttaattaattcctgactaaacttttcatattgctctttagtcataggacaattcaaatatgcagcttcaccacgatcataacgcgactttttataaacaattttcatatcaatcgagtcagcggccacaatcggagctgctgcatcaaagaaatgtaaactatcagttccagaaaatttttgaatctgtccagctaaagcatcactagttaacggaccagttgcaataattgtaatcccatctttcggaatttcagtaacttcttcttcgtgaacagttacattctctaacccacgcaaagtgtcagttacgtatttactgaaactatcacgatcaacggctaatgctccacctgcaggcacttgagttttgtcggcagctttcatgatcaatgaatctaaatgacgcatttcttcttttaaaagacctacagcattagataattgatttgatctcattgaattggtacaaaccagttccgcaaattcaccagtttcatgagctggagtctccttttttggtcgcatttcataaaggtcaacatgaataccacgcttagctaattgccaagttgcttcactaccagcaagacctgcaccaataactgttacattttttggcatttactcacctatattttctatgttaattgtttttttcgttttcactgtcttcacgataatcaccgttaggacaaagaatcactggaccttttttagaatgcttttctactaaaaagtggccatcatttggacaatttctgccaattggcttgtcccatgagacaaagtcgcattctggataacgagaacagccgtagaatttacgatttctacgtgatttcttttcgacaacctgacctttgccacattttggacaaactacaccgatttctttaatgattggcttagtattacgacaatctgggaaacgagaacaagcatagaacttgccatagcgtcccatcttaatcaccattggtgcaccacaaatatcacaattaaagccagctggttcatccttgatttgtaccttttcgatttcactatcagccttatttaattctttcttaaacggttgatagtattcgtcaacaacatgaacccaatcctttttaccatcttcgacttcatccaattcattttcaagtcgggcggtgtaatcaacatcagtaatatctgggaagaagctttcaattaagccatcaacaatttcacctaattcagttggtacaattgaacgaccatcaagtttaacataatagcggcgttgaattgtatctattgtaggtgcataagttgaaggacggcccacgccattttcttccaatgcgtgaactaatgatgcttcagtatagcgtgctggtggtaacgtaaagtgctgtttgttatcggacttagtcatcttgaccttgtcaccctcttcaagatcaggtaagtcaacattcttttcttgttgattatcataaaccttggtgaaaccagcaaatttcaatttagaaccagtagttctaaaaatcacaccattttgaacaatatctgcacgaacagtatcataaacagctggggtcatttcactggccaaaaaacgtgaccaaatcaatttgtataaacgatattgttccgtagttaggacactctttaatgactccggtgtgcgatatacagatgttgggcgaatggcctcgtgagcatcttgtgcgtcttcttgattcttaaaatggcgttgactcttagctgcaaattctgcaccataattttcatgcaaaaacttagaagcctcttgttgggcaactggtgatgttctcttagagtcagttctcatataagtaatcaaaccaactgttccttgcttacctaaagaaatcccttcatataattgctgagcaatactcatagttctacgagtacgataacctaaacgcttattggcttcttgctgcattgtagaagttgtaaatggggctgctggctgacgccgacgttgccgagcaacaactttatctactacaaagtcctttttcttatcgattttagccaaaacatccttaacagaatcgatattaggcaattctttctttttgccatcaacaccataaaaggcagatttaaaagtttctttacccttagcaaattccgcatcaattgaccaatattcttttggcttaaagttcttgatctccttttcacgatcaatcactaattttaaggcaactgattgtacacgtcctgcagataaaccttttttaactttggcccaaagaattggtgaaagtgaataccctacaattcgatcaagtacacgtcttgcctgttgggcatcaaccgtatccatatcaattgtccggggatgcttgaagctttctttaactgcatccttggtaacttcgttaaaagttactctattcttggctttttcgtcaagattcaatgcgtgcgctacgtgccaagcaattgcttcgccttcacgatcggggtcggatgctaaataaacatccttagccttcttggcttcgctttttaattctttaatggtatcgcctttaccacgaatggaaatatacttaggcttatagtcgtcttcaaagtcgattcccatttgtgacttaggcaaatcacgaatatgccccttggaagcaataacgtgatagtttcttcctaaatatttttcaatagtcttagcttttgcaggtgattccacaatgactaaggtctttttacgtttttttgttgttttacttttcgctttagtaggcattaactgcctccttaattcttattttattttatgggtacagtccaaaaataactaatactttctgaattgtcaaatctttatcttgttaaatttaaaatcaacaattggcgtagctcctgcttcaattaattgattgggacctgcagacaatgcattagtaattggtccaggtactgcataaatatcgcgattttcttgtaacgctaaattagcagtaatcagtgaacccgacttttctttagcctcagtaacgattatactttgacttaagccggccaagatacggttgcgttcaggaaaacgatacggacgcggtggtgtatcaggcaaatattcactaatcaatagtcccttttgcacaatctcttcttgtaaagcaaaattttgcattggatatgaaaaatttaaaccattgccaataaccgcaattgtttttccttggttgaaaagtgcagccttatgagctaaggcatcaacgccttttgctaagccacttgctacaacctgaccagattgcacaatattaggtaccaagcgattaataacatcttgactatacttagtcggatagcgtgagccaacaattgtaatgatttctttttgcagtaaagaaatatctcctcgggtaaacaataccataggtggtcgataaatttgacgtagtttttctggatatgcttcatcgaaaaaactgattacgtcacactgctgttcaatttgttgtaccattcgatccaactgatcatcctgaaaagcgcgatagcatgcatccattagttcctcagttaattcaatttgttctaattcttcaaattcaatttctgtttcatcagttacctgattagcaattgtcagcaatttaacataaccaatccctttttgcaattttaattttagtagaaattctgtttttttcataaaaaaagccctccactatttattacgcaaaaagagaccattatttttttataaattgaaatttattcaaaaaaatcactgactggagcaaatgttttgcggtgaattggcgtagggccatactttttcaaggcttcaatgtgctccttggtgccgtatcctgcattatgatgaaagcaatattgagggtatattctatcataatcatccatcaattgatctcgaaagaccttggccacaattgaagctgccgcaattgaattcgacttagcatctcccttaatcaatttaacttggggtagatttactggcacattcattgcatctaccaaaagtgcattcggcttaacatcaagtgctcgtactgcttgagccatcgcttgacggtcagcttcataaatattaatttgatcgattacctctgcactttttactccaataccaacactaactgcttccgctaaaattttaggatataacttcaatcgtttctctgggctcaatttcttcgagtcgtttacatctaataaatcaaaatcttgatcaattatcacagcagcagttactaccggtccagctaaagggccacgtcctacctcatcaacacccgctactaattgtcccttttcccagaactttttttcataagaaaagcgacgcaaaaactcttctttttttgctagtaattttgcttgacgcttacgataactaactaacaatttttgtacgccggcccgcggatctgcctcaagttcgttaatttgggcttcagagacctcagatttcaacagctcttttatttctttaattgtcatggtctatctaacgtaatccttccgattgcacccttacgcaatttttgtaacataaataatgaaaaacgatcataatcatcacgcatgccatatttttcagtcattgacaaaagcaaatctggatcagccatatcagcaatttgctgttcaggtaatttagaaaatttaagcaaatccttagcataaaattcacgtaaatttttcaaaacaaataatgctacatcatctgcatgaaaaacactatccttaattgcaccgaaagcagctaatttataaccaacttcctgatcagaaaatttaggccataaaatccctggtgtatcgagcacttgaatattagcatttgttttcagccatctttgtcccttagttacacctggtttgttaccgacttcagccacgttccgaccaactaaacgattaatcaccgttgacttgccacagttaggaatacctgccaaagcaattctaatagtaggatttgaggcccctcgtgcttctagcttctctgttttggcagctgccgccttttttactaaggaaaccaacttctgcatattagtattgtgcaaggagtcaagtgccaaaacatacttattatctccagctaattctgctgcccatgcctttgttaaaactggatcagctaaatcagccttatttaagataataatatgtggtttattaccaactagtccttcaatcattggatttcttgaagcttgcggaattcgggcatcaagtacttccaccaaaacatcaatcagtcctaacttatcttccagttgattacgagccttgttcatatgccccggataccattgaattgttgccatattatctcttctttctaaaattaatcattttcatcatctaagaacaccacttctgacatcaaaatctgtctatataaagccagaaagcctcgacgatattttctctcttgttgtgcaattttacctaaatagtcacgttcttgtctaaaagcatatctatatacctcagctctaaattctttctgatcatcgggtaattctttttgtttaattgtatactttatttccctagcaaaatcaaccatagaagtttgattcatttgtgcccttaaatcgaattttaattgttttcgaatctttttaggtaaatagatctttttcatttgatccatagcatactcaatcattgccacacgaactcgatcaacttcctttctttgatcaaaatcaggtatatctttgtccaagatcatgtgaaaaacaattgttggaacaatcatacttagtaaaataagcgtaatttcactcaccaaaattaaatggaaatctgctacattaatacgtaaatcatataacgtatatgctaaagcaaaagtaactgctccatgaatgccacccagactaaaaatcaatgcttctttattactcgtttttcctttaatagaagggctaaatcgataataaaagtatctaataagcaaattagctaggtataaaattattccgatcaaaatcgcatcaattgtttgttgattaaaatgtcttccctcattgaccgaacaatgatgattcccaaaagcaaaaagacaatcccatttaaaatatcaatcagaagttgcgataattgattactgttataaaaaataaaggcattagtaagcctgcttcgctcagattcaacgttatgaatcaatccggctgcaacgactgcaataattccagaaacgtgaatttcttctgctaaaaaatatattattaacggtgtcaaaaagaatatgacatcaaccggcattgcaacaccagcagataaatgatatttggagcgaaaactttcctgacgcaagaaaactaataaagtagccaccaaagctcctagaaaaaacctccacctgcagaatataaaaaattacctattgcttgtccaatccgtaattcttgatgcaagtaccaatcaactgccatattaagcaaaatgatacctgaagcgtcattaaacaaagactcatcttttaggtaaaaagcaatcttcttaggcagcttcaatccatgtgttacagattctgttgctgtagcatctgttggcgttgaaattgcagccagaataaaagccagtggtagagagacccatactaaaatagatcccgaatcccgcagttatagttgccaagataatcataataaccgttaacccaactattgcgccccacgaacgtaaaacattatacaacctagtacgttgtccctcaaaaaatagtaatggcgctacaatcaagcccataaataattccgagctaaagtcctcaattaatgaattagtttgtggtactagtgcaatagccgctccaatcgccattgcaatgtaattaactgatattctcttcaaaaagcgttgttgaataatcgtcgcaaatgctaccgcaaagacaataaaaccaataaaaattactacctgcatttttctacccacttaataaaaaagcccaggcatctatcaggcttgggcttaatacatcattttgtcttcatacattcgataagcacgatcaaaaattgacatacttggtaaataactagcattcaattccaaataatctgacaatttctcataatcttgttcttgcttaggaaaagtcaggtcatgctgtgcattattcgcaaattgagctacgtcatcagctgaatctgcatccctttgcgtcattaaatatcgataaaaactttctcggtaagccataattactccacataatataagatcgcataagcacccttgccagcatgtgttgcgataattggacttgtctctgccactaaaacattaatcgcaggattgattgcacgaattttttcagctaattcttccattaattcaggtgtatcaacgtacgaaatgcctacttctttaatatgctctttattatctgcgatttcttttaacactcgttcatcaaaagcacgtgtaaatttcttacctcgtccttttttggctacgattaacttaccttgtggcatctgaagagcgattctaatattaagcatagtagcaattcgaccagaaagtgcacctaaacggccacccttgattaagttttgtaaattaactaccatcatttccagtttttgagtactacgaatctttttaacatgatcaataatctcagccatgcttttaccagcctgagcatccttagcagcagccaaaacttggaagccttctgccctgtcggttagttcagagtcaataattgtaacattatcgctttgacctgcaatttctgcagcttgacgagcggcatctatcgtaccacttaatgatttagctaagaaaataccaatcacttgactgccatctgcggttaattttttaatcacatcaacaaaacggccaattggtggctgactagtcttaggtaagctctccgcttcattcatcttcttgacaaaatcacttctagtgatatcaatcccatccacatatgacttaccgtcgatggtaatcgtcaatgggactactgtaatgtcatatttttcaacttcttctggtgttaattggacggaagagtccgtcataacttttatcttcgacaacgtattcgccttcaattctaatttgtttacccgatttatgataaaatgtaagcaacatatatactgtattgtatcaaaaaactattagaagaaaaaaggattgattacacttcatgaaaattagcaaactttggcagcaaccagaacaacgatcagaaaggtactaccttctagataatatttttagtgccataactcatgggattggtttcggactagcagttaccggcttagtaattttaattgtaaaggcagctcatacaggcagcccgatgcgagttgttactttcacaatttatggctcttgcctggtactgctttatttattttccacactatatcacagtttagtttttacacgggccaaaaatatttttcaaatttttgaccattcctcaatctttcttttgattgcaggatcttatactccatattcacttgttgcaattggtggagcctggggttggactttatttggcttgatctggggcctaaccatctttggcatcatttactacatcttcaatcgtggtaaacacgtcatacttgatacaatcctctatgttgcaatgggatggttagttatcttgtcaggatcttatttatatgttcgcttaagtccaactggattctggctattagttagtggtggcattgcttacacaatcggcgcgattctgttcagtatgcgcaatgttccctttatccatactatctggcatttatttgttatgctcggttcaatcttaatgtacttttccgttttactttatgtttaaaaaatgtagcagttgaattctgctacatttttctttctattcaattgtagtcaaatagctttcaatcgcttcttgattattctcaacttcacctgaaacaactaactctcgaattttattcaaagtctgccccaattttgcacctggtcgcatcccgcgatctattaaaaatctcccatcaacggctagttccgacgcttttttaataggtaaagccatataacgatcaactaaagcttctgaagaaattggttgaccaacaatatgagcaacgtcaatcgtattaattaatgtctcttcccctgctaagaataattcataatcactaggagcatgactagaaagtaaatcaaatagattaataattctttcgacttgctcagtcatagcattagagtttttccagtcacgcataaaacgatgaatttgttcattcggtaatttcaatagcaaaattatcagtgaccacaaactattttccatcgttggactgaattttaactgtgggaaaatagctagttgatctttttttccgccaaaatcaggtacatcttcactcaaatttgtatcaagaaaaacctgaaaagcttgccgagcatgtggtcctaaacctaattttacaaattcttctcgaattcgttcaactgaaatttttttaagtaatttatgattatccttaattgcctgttgggtcttgctttctaacttaaattcaagttgactcataaaacgtacggcccgcatcattcgcaaagcatcctcgtgaaatcttttttctggatcacctacagcacgaatgacatggtttttgagatcatctagtccgttaaataagtcaacaatttgccctcgtgtatccattgccagagcgttaatcgtaaagtctctacgctttaaatcttcatctaagttttgaacaaatgttacatgatctggacgacgaaaatcttgataacccgattctgttctaaaagtggtaatctcataactttcaccaccataaaggacagtcaccgttccatgtttaattcctgtatcaattgacttatcaaataactcttttacctcttctggataagcactagtagtaatgtctacatcatgaacatgacgatgtaacaaaacatcgcggacagaaccacccacaaagtacgcttcaaagcctgcattttctaatatctgtaacacgggcattgccttggtaaaaatttctggtaaattatctatctttatcatattaaaatctcaattcttattgtctttattattacttttgctatacactttgttaaaattgaggaaagacataaaggaggtaatcattatgcgtaagattgacaaaagtatcttaattgatatcctcatgatcgcgctaggctgtgctatttacgctttaagtctagacatgatttctgtccccaataaactagccgacggcggactaagtggtatttcacttcttctgcggcatttttggggcatcaacatgggactatcgacccttgtattgaatattccactaattttgttaggctatcgctttatgggcaaacgtcttttagcctatacaatctggggaacgctcagtctttcctttttcttatggttttggcattcagtacctattataaaacaattagatttagaacacgacctcttcctttcagcaatttctgctgggttattgtctggaatcggattagggttagtatttagatataatggtacttccggtggaactgatattattgcccgaatctgtcagataaaatttggtatttcgtctggcaaaatgcttttagcttgtgatgcaatagtactcttcgcatccctatcttacctagacatcaagcatatgctatacacattattagcttcttttgtcttatcccgagtaatggataccgttcagcaaggtgcatacacagcccgtggtttattaattatctctgacaaatatgaacaaattggcaagatgattgatttaaaactaaatcgtggtttcacatatctaaaagctttaggtggctatcaacaaaatgaaaaacgtgtaatttatgttgtagtcgcaccgcgggaaattccatcaatcaaagctttaatcaagcaagaagatccacatgcttttgtttcaataattgaggtaaatgaggcaatgggagaaggatttacttataaaaaaccacatcgctttttcatccacaagtaaaaagctataccatgatgcatttcatgatatagcttttcttttactaataattaataattacagtcaatacgttattagctttaacgtattcgttttctccaatttgaatgaatggccgttcatcaatttctttatggccaagatttttaactttagagccttgtttaacaaacttacctggaattggctgaccatttttatcataaacatatgatggatgcttaatgcggttaattgtctcggctgtgtccttaatgtatggtaaaaatgccccttccttaacgaatttattcttaccaatcttcacaaaattattgccattaattgatttaatgcctaggatcttgtaaacacggcccttttttaaatgtccaactttttctcctttacggttaaaaatcgttgcttttctagtcaagtttaactttttaccctgacgaattggattagttgtagctgcgttaactgtctgagcagtcatcgcacctaaacttaaggaggctaagactactcctgccatatacataatttttttgttcatcatgatctcatcccctaatcattacttaatcttcttacctatattttaacaaaaaatgcagaggttatacacttttctctatttttatttatgggatggataacacttattctttgcaatctttcatggcaagaactaatcttagcttgtaagcgtttgtcaatatcaagcaatcaagaggatgaaaacaatgccaaaaaacagttactcccaagaagctttcgttcatgtctatttacttcttgggaattaatggggtaattgggtccggtgcctttttaatacctcaaacaatctataaagatatgaacttgatgagtgttttcataacaatttgtgctgctcttacagtaagtatggttactctttgttatgctgacttgtcaagtcgttttactggatcaggcgcagcttggctttattcatatcacgcctttgggcgatttactggctacgaacttggaatatatacttggtttttaggatgctgtacatatgcggcagaaatagtagctttgttaactattttaaagactttgtcccctgtttttagtaatcacgctgttcactacgggatagctattggaataattgtgctaattgtgctgtttacgattattaacttatttggtcggacaattgtaaaattagtcgataacttatcctctgctgccaaaatgattactattctgatttttatcatcattggtgccttttttattcataaaatgaactttacacctgtgattcctaaagcagcaaccctaggtgttggtccttacttcaaacattttggtgctgcatttagtgtagtattttacatgtttactggattctcctttattccgattgccccaaaacagatgaataatccagagaaaaatattcccaaagtattgatctcagtgatgatcactgtgactattttatatgcattaatgatgttagtagctatcgggattttaggatccaagatggttaattacagtacgcctattgctgtagcctttcaaaaggccgttggtgattggggctacgttctagtgattgcagggatgctgattagtgttatcggcgttgcttttgcaggatctttcaatactccatcgttgattgcttctcttgactccatcgttgattgcttctcttgctaatgagcacgcaatgttacctaaatggattggaaaaaagaacaagcatgatgctgcttgggtagctattttactcagtgcaatcatcactatgattttaatcacacaatcatacctcttcttggtatcttgcattgtattggcttcatttattcaatatgtaccatctatcttagcagtaatcaaattcaagcatactaatgaatttccaaataacggttttaagctcccattcggctatgttattccagctttggcattaattatttcatgctacatggtaaccaatttcacttggaaaactattttggtcggaatagtcgtaggggtattagccgcagtagcttacttcttcattgaaaaagatgaagaaaagcatcaaaagtatttgtcaaaaatgcgtaataaataattttcaagttataaggacgatgactagaaactgtcaaatcttttgtgtaaatagttctttctcgtaaattgattttttaattatttatttaatcaaagtaggattctaaggtgtcctgaacctgaccaaagcctttatgaattcgattgaaataacggtcattgtagctcattgcctgaataccaataaaagcatcaagcgactgttcagttggaaactctgccttaggcttagctttgcgcttgatcacattgttaaatgattcaatcatgttagtcgaataaattgaagctctgatctgcttgggatagttataaaagaccagcagatctggttctatgtctttcaagcttctgataacatggctgtaaaccttgccccatttggtatagaagtcatgcaggacagctgtggcttcttctttgtttgtctgttgatgcacctgtttgaattcgttcatgatcttttcacgatcgtcgacgcgtactttagcgcagatattgcgcatgacatgaaccaaacagcgttgaaaatgagctttaggataagtcctggccaaggctgttttcatgccaacaacaccatcagaaagaaaaagctcaacttgctttaagcctcgggatttcatgttttgaagcatctctgtccagacttcaatgttctcgctaggtgcaatgcagtagtcaatgacctccttgtgcccattaggcttgatgccaatggcaatatagactgcttcacgctcaaatgtttctcggcgcaaaggaaggtatgtcgcatccaaatagacgcagaaaaacttgtcgcttagcttgcgtttgtggtaagcctcaacctttggaatcatctgcttggaaatatttgatacctgagctggactgtaatggctgccatacatcttttcaattagatcggctatttccctggtggtcacgcccttggagtaaagcttgataatcatgctttccaagatatccgagtgctgcttgtagccaggcagcgtgtgctgatgaaactgaccgttgcgatcccgaggcacttgcacttcaattgggccaaattgcgtatcaactttgcggaaataagcaccatttctagagttgccagtattccagccatttctggcatagggatcatagcccagaaaggcagtcaattcagcttctaacaagttattaacagcctgttgtagctctttgcgcaataaatcatttattttgtctggattgaatagagcttgagcaaaatctttggtaaaatcattcatgaaggagttcttctttctgtatgtgtttttttgttcaaaccaatcatacgagaaaggaactcctttttctaatgtttaaagaaataaatttaaggaatcattcatccttacacaaactattttacagtctcgatgactatccaatatcgcccttattttttgatcaattaagactttttagtctgcttttaaatctatttttcaacttatacattatgaaagcccatctcctcttaataatatttagtgctaaactgttagatagattagtattagaaaagagcaacaacaaatgagtaatcagaaagctaaaataaataataccgaaattaaaactagagtatctcacttcagaccaagccagtaaaaaaattcaagttaacataaaaggaaaaccatatgtctgaagagataattaacacagtcacaacaaaaaatgattttaagagtgcattaagaaatgcgggtattaaagatgatgataccgtattagttcatactgcactaagtaaattctattacgttcctaatggtccagaaaccattgtcgaagccttaaaagaagctgtgcctaatggaacaataatgatgccctcacaagtttctacgaattgtgatccagccacttgggaatatccaccagtacaaaaatctttgattcaagtagttaaggatgctatgccaccttataatcctacaacatcaatgacagaaggcttaggggttacgccagagtatttcagaactttgccagatgttgttcgaagtacccatccttacttgccaattgctatttggggcaaaaacaaagtaaagattgcacagaatcaacctttaaatattccttatggaattgacagtcctttagattatttgtaccagaataatggcaaaactatctttttaggcactgattatgaaacgtgtacagttttgcactatgcagaatccacaattggtagaaaaaccgaaacatgttctgctgcaactagtctggatgaaagcggcaaaactatttggactgaatatcaaaatattgatatggattcatatgatgactttaatgaattagggacagagtttgaagcaaagcatccctctgctatcaaaaaggttaagttaaacaatggtgtcatcaaagcaataaatgtaaaaccgctaattgattttgctagaaaatggtttataaaaaaagacaataatcattcaatttaataataaaaggaagaagtcactttcaacttcttcctttttctttatttaatctttgttaaaacctttgcacctatatttaaacctacactatgcgatttaccgccccaatcacgttcatcataattatccatatcagctaaagtatctgcagtgaaaagaaattgtgcaaaatcaatctttctaaactgagcacatgctgctaaagctgcacattccatttctacagttgacgcgcctaactgacgaaattgtgccacttttttaggcgtttctctaaagaaaccatctgttgtccaagtcgttatctcgtcatattctatatttagctcaactaaaatcttttctacttccttcaaaaatatagaatctagttccacaagttgtccaggattcatatagtgaaaagatgtcccttcatctcgaattgcacgtgttggaagtagcatcgcattttcaggtaaatctactaaggcacctgctgttccaatggttaacaccttttctactccataagcaattagccattcaagcaactgtacagctgccggtgctcccaagggcgcttgacacaaagtgaaaaattcgttattaatttgaacttcataaattttaggattaaaagaacatgactcaaattcacctaaagtacggtgaaaatggtgatctaaaaatgcattaatttctttttccggcacgaatgcgtaaagcaatcttggatgaaaatgaaatggttcttgatcgtgatttggttcaagaaccgcatgaggatgtttgtcaaagtctaaaatgaatggttgtttgttcatattttacactccatttttagttgaaatattatcataaactcgctaatacctgagatccaatattcaagctaacgctatatgaatcatggccccagttacgtttatcatagttatccatatcagctaaactatcggcagtaaacaaaatttgtgcaaaacttatatttctaaattctgcacaagcagctaaagctgagcactccatttctacagtttttgcacctagttttttagcttgcaaaacttgattaggtgtttctctaaaaaatccatctgttgtccaagttgttccctcttcatattggaaacctaaattttttatttcattctcaactcttcttacaaaatttttatctaatgcaataatcttacttggttctttgtagtaaaaagatgtcccctctccgcgaatcgcttcttgagggacaaacatcgtgttttcaggtagattatccaaagctcctgcgtttccaacagataaaacttgtttaactccataattgatcaaccagtctaaaaactttgttgaagctggtgctcccactggagcttgacataacgtaattagttgattattgacttccacttcatatattttaggtctaaacgaaacagttttaaatttgcccagagtcttatgagagtgtttatctaaaaacgagttaatttcatcatctgggacaaatgcaaaaagcaatttttcatgaaacttatactctaaattttcgactccaggttctattacagcttttttacttaaatcaatatctaaaacaaatgatccttcattcatatacgcgtggtgctagttaaatcgttctagacaataagccaaattataagctaaaattgcaatttccaaccggctttgaaagcctatcagactacgtgctcgattgttctcggcattgtaataggtcagaagcgaaaagtcgctttcaattgttctgcgaatagccatcaattgatgatcattgtgctttttagctcctgtcatatttttacgatatggtgtccaaagttcgtaacccatttgttttagctgttgatgcagttctttgcctaaatagccttcgtcgccaagaagatagtaattagatggatgggtattttctatcagttcaactgtctccctggcatcatgaactgatgcctttgttacgacataatcaagaatgtaaccgtcatcgctaacaatggcatgaactttgaaaccatagaagtaaattttcttggtggccttataaccaatgttggcataaccgcgaaaaattttagcacgatagtttcgaattggttggcaaacaggtaccggaaagctgtcaatgatcaagaactgtccattcaggtcaacctttttattcatttcttgccgtatctgataaatcaattgcaatagctgacgtgaacgccgattaaaacgtgagtgtgataaacaattgaaacattcacagaatcttctttgtgattcaattcctgtcttagcttgccagataagtaaagccaaaatcagactgtccgtagttttaatttgatcaatatttcgccgatgagtaaactcagccggtgcatacaaacgataccagtgccgacaaattatcactaaatctttaaaactaacttgtaaatggtggctaaaacgcttaagcttaaggcagttcaatcagatcagactcttttctattattactatttacaagtcgagtctaacaagattggacttttttattaactaaaacgatttaactagcaccacgcgtattcatatatattctcccttaatcaataaatggatagtcttcattaaagtaatgatcaataaaaatttgatgttgcttgttaaaaatcttggataatttatctttagaaaaatacttcagatcaagagtttcagagctaatctcttttgacattttttctactaattcaacagttactgcctgtgccacatcttgattaggataatgctggataaaattagttgaaacgcctaatagtgacttagttcttacttttaagccagtttcttctaaaaattctcgaacgcatgcttttggagctgattctccaaattctaaagcaccaccaggtaagccccatgcattaaaatctgatcttttttgaagtaagatttcattcttgctattagccaaaattccaccagcaaaatttagaataattggttcatgaccaactttttggcgtaaggtcttaatatagtttttaaccatcgctagtcctctacttgaatatcattcatcacaatttcaacttcatcgtctaaattaatctgactagtaaaagcatactcgggaataaaaccaagataatctttttcattccaccatgagcgcattgtttcttcaccaaaagaatgttcatgacgagttttatggcgtttcattgtttcttcaaacggaatatcaaaataataggcataaatttgatcaccaaaaagctgctgagattttttgaataaatcagcataccatttcgcattcaagataccttctaaaatagtgtaagaacagtgatgataaccatactcaagcaagttttctaataatggcaaagcaaatgtcttttctccgtctttaacattcagcatttctcttctaactgtatcttgtggaatcaatagtgtattgtgtggcaatcgacgatggatttctttagacagtgtagttttgccactgccagagtttcctcgaattataattaattttgatgtcatcatagaaatcttcactttcttaaaattaattcactgcatctctaattgttgcaaacttatcaaatgtataatctattataatctataccatgaattttaacaataggcagcattttccctttttgtcccatcaataatcctgcagaagcggctagcatgtcacagatagtttcaacattagttttatcttgatactgactttttcttaaaccagaaacaccatacaatccaattgctacttgagttgcaccttttttatcaattcttccatcactatcggtaattatgatagctactctgacttttaattgatcaaaaatatcatcactaattctcttagcaatttcatcacaatttttaggtaaaactattgcagtaccagcatcaattttatctacacctgcactagttaaaaacaaaccattcggcaaccacccaccaataaagttcttagatatctttagtttcttaccactcttatcttcggtttgatcaattataatctgaattagtcttggagcttttctaggtatttgctgatgcaaacgtaaggctaattgacttggattaatagaatttaagtgaacaaacagaccttcagatttagaaatcaatttagaagcaatacataaaacatcattatcgcgtatattaaatccttcatttttgattgtcctaattatttctgcacttaagttgcactttctctctattttcggaaaattatgcagcgcttcaattgtaatcatgactataacctcaaatcagatgttaatttgcccaaaacagtaatttcgtttctatcgcaatacttcaatgtttttatgatcggttaccatgatttatctggtatctttctcctttattaatggtattgttagcaaaacaacaccaaaatacactgcggatacaaaaaaacattacttttaagtctccaaatactttcataatactattgcttataaataatgaaatactaaccaagatctctgcaataaatgaaacagttgaaagcatagtcgacttattgctttctccataaatggcttcattactagtagctgaaatttgtcccgacatcattcccatcaatagttcaattaatagaaaaaggcaaagcagtaaatatttattttttagagtaccacttaatataaatgctccaatcatacttccagtattcaacaaagtaatcccttttgaattaaaggaagtagaaattttactaaataaaatcgaagagactgtaaaatattttgtgtaaggatgaataattccttaaatttatttctttaaacattagaaaaaggagttcctttctcgtatgattggtttgaacaaaaaaacacatacagaaagaagaactccttcatgaatgattttaccaaaaatatagcacaagctctattcaatccagacaaaataaacgatttattgcgcaaagagctacaacaggctgttaataacttgctagaagctgaattgactgcctttctgggctatgatccctatgccagaaatggctggaatactggcaattctagaaatggtgcttatttccgcaaggttgatacccagtttggaccaattgaagtgcaagtgcctcgagatcgcaacggccagtttcatcagcacacgctgcctgactacaagcagcactctgatgttttggaaagcacgattatcaagctctactccaaaggcgtaactaccagagaaatcgctgacttgattgagaaaatgtatggcagtcattatagtccagcccaagtatcaaatatttccaagcagatgctccccaaggttgaggcttatcacaagcgcaagctaagcgacaagtttttctgtgtctatttggatgcgacataccttcctttgcgccgagaaacgtttgagcgtgaagcagtctatattgccattggcattaaacctaatggacataaagaagtcattgactactgcattgcgcctagtgagaacattgaagtctggacagagatgcttcaaaacatgaagtccagaggcttgaagcaagttgagctctttctttctgatggtgttgttggcatgaaagcggccttgaccaggacttatcctaaagctcattttcaacgctgcttggttcatgtcatgcgcaatatctgtgctaaagtccgggtggatgaccgcgaaaagatcatgaacgaattcaagcagatacatcaacagacaagccaaaaagaagctgcagctgtcttgcatgaattttatgcaaaatggaataaagcttatagccatgttatcaaaggtttgagggaaattgagcccgatctgctggtcttctacaattatcccaaacaaatcagagcttcaatttattcaaccaacatgattgaatcctttaacaacgtcatcaagcgtaaagctaagcctaaggcagagtttccaactgaacagtcgcttgatgcttttattggcattcaggcaatgagctacaatgaccgttatttcaatcgaattcataaaggctttggtcaggttcaggacaccttagaatcctactttgattaaataaataattaaaaaatcaatttacgagaaagatctatttacacaaaagatttgacagtttcttttttaagatctataacctctttaactatttctgcaatttgttttggatattcaaaatgtatatagtgagattcgcctaatgttataactttagatttaggattatttgaagtgtattctgaccgcttatattcattttcacgatacttttctgtaataacaatacttggtgttttatcacttatcctggtagtatttttccaaaacgaatcattttcgtaggctgcttgtgcgtttaaattatccttttcatcaaatttcttcgcattttgctctgtagttgtccaaaactttttattttcttctggagtaaaaatttctctaagatcagcttcaattttttcttgaagttttgccatgtttttatttttctcaatataagctggttcctttggaggatttaacatgatttctctagtagttggctcaattcctacaaaagccttcaaattattgattttatctttcatttgcatagcatacacaccgccaatgctatgagccaaaattataactttttttgcattaaaatcgttaataattttagctaatttagtagcttcgtctgatactgtatagtcctttaaagacttgccactaaagccactattcaaataatctgatgcaaaatagccatacttattgggcaaagcttcaattacttttgaaaaagattgtgctgtatcaaaactaccaaagccattcaaaaaaacaactaatggatctccctttcgataggcaaaattaatcttgcctaattcagtttcaatatcgcttctttgcataaatttctccctttattaaaactttgaagtcgttatattttaattatttcttagcacaaataccttatgcccattttcatcatcttttaaatacacgaaactacttcgcttagctacattctgactagcggaattcttaggatgagttcttaaaatcaaataatcaagcttcaactgttcaaatgcgtatttcttaagaaattcgacagattcagtcataattcctaaatgttgaaaatcattagaaagccaatatcctacttcgccagattcatgattcaaattatgtaagtcaatcatgccagctggctgtccatcaactaaaataactaggttgaatgctgtaccatcaaccattttttgttgaaacattttaattgaatcggcttctttttgaacagaatcaattttgttggcccaaactaaccatttagaaaactcagtaagatttttttgaagttgatcaaataagtcttttgcttgccaagtctctggaagaactaattcgatttctttatttttagttagaaatttatgtaaaacaaaagcagtatgacacatttcggaaactgtcaaatcttttgtgtaaatagttctttctcgtaaattgattttttaattatttatttaatcaaagtaggattctaaggtgtcctgaacctgaccaaagcctttatgaattcgattgaaataacggtcattgtagctcattgcctgaatgccaataaaagcatcaagcgactgttcagttggaaactctgccttaggcttagctttgcgcttgatcacattgttaaatgattcaatcatgttagtcgaataaattgaagctctgatctgcttgggatagttataaaagaccagcagatctggttctatgtctttcaagcttctgataacatggctgtaaaccttgccccatttggtatagaagtcatgcaggacagctgtggcttcttctttgtttgtctgttgatgcacctgtttgaattcgttcatgatcttttcacgatcgtcgacgcgtactttagcgcagatattgcgcatgacatgaaccaaacagcgttgaaaatgagctttaggataagtcctggccaaggctgttttcatgccaacaacaccatcagaaagaaaaagctcaacttgctttaagcctcgggatttcatgttttgaagcatatctgtccagacttcaatgttctcgctaggtgcaatgcagtagtcaatgacctccttgtgcccattaggcttgatgccaatggcaatatagactgcttcacgctcaaatgtttctcggcgcaaaggaaggtatgtcgcatccaaatagacgcagaaaaacttgtcgcttagcttgcgtttgtggtaagcctcaacctttggaatcatctgcttggaaatatttgatacctgagctggactgtaatggctgccatacatcttttcaattagatcggctatttccctggtggtcacgcccttggagtaaagcttgataatcatgctttccaagatatccgagtgctgcttgtagccaggcagcgtgtgctgatgaaactgaccgttgcgatcccgaggcacttgcacttcaattgggccaaattgcgtatcaactttgcggaaataagcaccatttctagagttgccagtattccagccatttctggcatagggatcatagcccagaaaggcagtcaattcagcttctaacaagttattaacagcctgttgtagctctttgcgcaataaatcatttattttgtctggattgaatagagcttgagcaaaatctttggtaaaatcattcatgaaggagttcttctttctgtatgtgtttttttgttcaaaccaatcatacgagaaaggaacccctttttctaatgtttaaagaaataaatttaaggaatcattcatccttacacaaactattttacagtctcgcctgcggcatcatatcttgaatctgcttcttggcccgctttaatatttttcccggccatttttaccaaattgcccacctgcatatggctaatattaaagccagacaggcaattgactgctagagcagtattgcgataagtggcaacgctgcttacttctaagatgtttttgactgctaaaatactgtagcgcttgtatttgtaaaagcccattaattcatccaagggataccttgcttgtttgcctgggcagacatatcttcttctgacatacctaacttcgccaaaagccatattgattgagcgctcattcttcttatcaatctgatagccctgtgctttaaccttggtaatcatttcatcatcaactttagctaaagccaaggccatgatttccttaatcaggtttaagaagaaacagattatttttctttcacgcttaatataattatcttcagactttataatatttgcgatttcagttacaattgaattcataaaagaccagcttctaatgtgttttttgttcttaacatcagactactggtctttttgtttgagctcaagtccaaattcaaaggacttgggcttttttaattatttattcaacttaccgtaaaaaattatacacttagtgacgaaatttttgctattcaaagtgctcaaaaagagacgcgtaatcgttatctaaaaaaacaaaaagctatgttggcagaacatgatcttttacccgaaaaaaagcgcaaaccacgtgcccgcatgttatcagagctgaatttaaacaacgatgatgctattttaacttttgccaataaagttaaggttttcaccagtggacccgagttgtttgaccaaataattgctgatcttaagcaagctaaaacatcgattagtttagagttctacactttttataatgataatctaggaaagcgtgtcttacgggccttagaagaggcttctgctaaaggagtaaaagtcagagttatttatgatgtctctggctcacgtggtactaaacctgctttttttaatcatttaagagagcttggtggcgaagcacagcctttcatttctacttctaaaaagcattggtttactacaccacgactaaattatcatttacaccgcaaattaatcgtaatcgaccatcatattggctatattggtggctttaacatcggtgatcagtacgttaatcaatctaaaaaatttggtcattggcgcgatacacatttacgtgttgtgggtcaatcacctatcctaatggagacacgctttgccatggattggaatacttctatcagacgaactgcattacctaaatttgatctaagcgaattacatgcttttactgtcgaacgtaaagatcttgacaacgatgataacgtagcaatgcaaatcgtttcttcaggtcccgataaccaacattatggcattcgccgaggatatgagggcatcattgctggggctaaaaactatatctatattcaaacaccctatttaattcctgaagaatccattttagaagcattaattattgctgctaatagcggtgttgatgtacgcatcatgatcccttgcatgccagatcatccctttgtttaccaagctaccgaatattatgcaaaatatttagttgctcatggcgttaaaatttacaaatataatgatggcttcatccatgccaaaacaatggtttctggctccaatatctcatctgttggttcagccaatcaagacttcagaagttataccttaaacttcgaggttaacgcttttaattacaatattcaattaactcaagaacttaaacaaatttttgaaaaggacctagctagttgcagtcttctaactaatgaatactttaatcagcaatctaaatggcttaagtttaaacaatacttttcacgtctgttggcacctattttttagaaataataaaaccacgaagcaaaaacttcgtggtatttttttacagattattataaagatcctgcatttcatcatcttctggagctaacttaagatatctttctagcagttgttttgttatttcatcattattttgtacattaaaaaagattatcatttggcgcaaaaagtctggattatccttgaaatccggataagctagtaaaaattcgctctgtgctttctgaatatcatccaaatcctcatatgataatgccatattccaatgtgcctgtggctccacgctttcctcatctaagttactaaataaggcaatattctccttagcctggtgttcatgaacatataggttagatagctgcatacgtaaatcactattgtctggcgctacttttaaccccttttcaagtaagtcacgagctgtatccaattcattcaaattagctgctgcacgtgctcccattgaataaagtgtttcatccagttcattgtacgctaatcctgcttgagcagtcctcaatacttgttcattgtcatgctgatgatcataagcttgtgctaataatggatacgcatttacatagtcaggactttgctcaatcacttcatctaagaacttaattgcctgcttatcatcacctacagataagagaactaatcctgcttcatacttagaatcaatatctaaaatactatttgcatgttcacgaataactttggcagcttcttcataattacctaatttggcaaaagtcgcaaataatctttggtacagatttacttcactaaaagtactttgacgtttgattaaatcttgatataactcaagtgcttgttcctaattaccacttaaatattcaatctctgctaaaccaaatttaatagcatcttcttctggagctaattgtagtgctcgtattaatttgtccttagctgtttctattaagccgttagtttggtaataatcagcttgtactaatagactatccaaataagctgaagagctctcagggacattatataaaagcgacagaccatcgtcatcatcgccatcatttaacataatctctgccaagtaaactttaaataaatcttctttaggaaatttagctattaaagctcgatatatttcttttgctaaatctgtaaaacctaagccagttaggttttctgctaaagatgacaagacctcgggagcatcattatctaaagcttcttttaaaaggtgtttgttttgtgaaaaatcatgattttgaattgcatctagtaattgttcagaataactcataatacctccaatcaagttaccattgtactaaaaaaagacgccggaacaaagtccaacgtcctatcacattagttaagctattacttaacggcatccttaagagctttacctggcttaaatgcaggtacttcactagctgggatttcgatttcatcaccagtttgtgggttacggcccttacgagcagcacggtgacgtacttcaaaagtaccaaaaccgattaattgtaccttttcacccttagcaaggttttcttgaattgaatcaaggatagcatcaacagtatttgcaacttgcttcttagttaacttagtttttgaagcaacttctgaaactaattcagccttatttgccatgaataattcacctcctgaatttgaacctaatgttcaaaaaatttttctttgtttaagctaaacaaggaaaaatgatcacaactaatcatgttccctaaaaacaaaaatatcacaaaaaccttataacaacaaggttttttatgatattttgcttatcttttatttacgtttacgtggtaaaatcttgattggtgtacccgtaaaatcaaagttttgtcgtaattgattaatcaaaaatcgttcatatgagaagtgcatcaattctggatcattcacaaatacaacaaaagtcggtggattcgtacttacttgggtcatgtaataaacacgcaatctcttacccttcaccattggagttggaactaacttacttgcttcaagcaacaaatcatttaagacactagattgaattctttgattttgattatcatagacttctttaaccatattaggaatttgatctaatctttgacctgtcttggcagaaacaaaaagaataggagcatagtccaaatattgaaattcatctctaatttcacgttcaaattctttagcgcttgtactattctttttcggcaaatcccatttgttaacgacaatgatgattccacgacccgcctcgtgagcatatccagccacatgcttgtcttgttctctaatgcctgtacttgcatcgaggacaagtaaaaccacgtctgaacgctcaatagcactcatagcgcgcattacagagtacttttctgtcttctcatacactttgcctcgtcttctgattccggcagtatcaacgaccttaaattttacaccatcatgagtaaacggcgtatcgacagcatcacgagttgttccttcttcattagcaacaattacccgatcttcaccaagtaatttgttaacaattgaagacttacctacatttggtcgaccaatcacgctaaaagaaataacatcatcagcttcagtatctttatcgtcaggaaaatcattaacaatctgatcaagcaaatcaccaataccagtaccatgactacttgaaacaggaatcggatcccccaatcctaaactatagaaatcataaatatcgcttcgctgttcaggattatcagctttatttacagctaaaataactggctttttagtacggtaaagaagatgagctattctttcgtctaaatctgtcacgtgatttaccacattggttaacatcacgataacatctgcttcttcaattgcaatttctgcctgagctctgatttcttcctcgatcttgccaccttcccaggtaataccaccagtatcgatcaaatcaaacttatgccccatccattcggcttgagcataattacgatctcgggtaacaccaggtttgtcctcaacaatagctaaacgttgattaattattctattgaaaagtgttgatttaccaacattgggttgaccaacaattgcaacaactggtaaaaccatttctcgccctcctttactaatctaaacataaataaaaaagccgactcaagtcggcttttttataaaatgactacttacggtcctttaattggtcaccaatgatgtcacctaatgcaaagccgttgtcgttatcactcatgtacttcttgtttactgaattttcgttacgtgaacgacgtggacgagaattatgattttctgaagaagcatttgagtcagcagccttgattgaaagtgagattcttctatcacttgggtcaatgttcaaaaccttaaccttaacactttgaccaacctttaaaacatcgcttggcttgtcaacatgcttgtttgagatttctgaaacgtgtaccaaaccttgaataccatcagcgacttcaacgaaagcaccaaagttagttaatgactttacttcgccttcaaaaatatcgccttcgtttaagtcagctgtagcttgttcaaatggagaaggttcagtttgcttaatagacagggaaatacgatgtctgtcattgtcgataccaatgaccttaaccttaacatcttgaccaacctttaaaacatcgcttggcttgtcaacatgcttgtaagaaatttctgaaatatgaactaaaccgtcaacaccaccaacatcgatgaatgcaccgaagttagtcaaacgtgaaaccttaccttcaacaacgtcaccaacaactaattgtgatgcaaccttgtcaaatgcttcttcacgttcttcttcaactaaatccttgtgtgaaaggattaagcggttcttgttaggatcaatttcggtaatcttaagtttcatagtcttaccaatataaggcttaagatctgaaacgtaacggtttgaaattaatgaggctggtaagaaaccacgtgtaccaacatcaacaattaaaccaccacgaactgatgaagttacagtaccttcgacagcatttccgtcttcgaagtctttttgtaacttgtcgtaggcttctctttcctttaagcgggtaactgagaagaagaattcaccattttccttgtcgccaccggctcttcttaatactaaggccttaaacttgtcaccaggcttaactaaatcacgtaagtctgcgttacggtctgaagtgtattcacgacgagtaatgacaccttcaacaccagcgttttcaacaccaacatcgatttggccgtcttcaatgtctaatacttcgacatcgacaatatctccgacctcaactccttgcatttgctttaatgcgtctaaaaattgattactgttttctgacatatgtacctcccaatatcatgtcccattttataggaaaccgagatatttttctactattttgtgctattttttctaatttttttgttttttttcgatttgagctaaaattgcctctacaacttcgtcaatcgacatgtttgtggtgtcaatttcaattgcatcatctgccttttttagcggtgaaattttgcggtgagaatctttataatctcttgctgcaatatctttttcaatttcatcaactgtttggtcagatttaataccacgctctttaaaatctaataaacgacgttcagcacgtgatcttgctgaagcaactaaaaagatcttaacttcagcgttaggtaaaacagtcgtaccaatatcgcgaccatccataatgacatttgtcttgcctgccatttcacgttgcagacttaccattttttctcgtactttcggcaaagcggatacttccgaaacattagctgaaatttcaggcgttctaatttctttagaaacgtcctttccagctacatatactttttgctcaccattttcagatttcaattcaattccatcttcatcaatggcattcaagatacccgcttcatcaccataatctaagttatgattacgagcaatcactgtacatgcacgatacattgcccctgtgtctatatagacaaaggataatttacttgcaatgattttagcaactgtacttttacctgctgatgcaggaccatctactgctacttgcattctaataaaaaagagatcttatcatcgaccccttttatcctttctgaaagattatttcaacttaagtgtctgacctgcttcaatatttgaagagtctttaagattatttaatctggctaattcatcaacagtcaagccattcttttctgcaatttcatttaaagtatctccactttggactaaataagtcttaggagtagcagaactactagatgagcttgaactagccttttcagactttttcttgctaaaagaagatgatgaggttttcttagtcttaacagacttggatgatttagaagaaaccttcttaactgtttgaacttcttcagctttttctgaatggcttgaagccaaacgatgaacaactgggataagtgcaattaaaataaccgctaaaattataataactgctatccaacgtgctgatccactaggctgactatcttgtgagcttcgcttttcagtaggtcgttcatagtgctgatatggcccggttgactttttatccatcaaaaattcctccattcacttaacggattaattttagcatattttaggatgctttgaatatgaaaaatcccatcaacttaaaaaattgatgggatgataacttaattcaaattaaatctcttacgaacgaatggcttaattgttttcaaggtagcttcaaacaataagtaaacagccacagcgttaattaatccttttaacaagttaaagggcatgataatactaaaaatgtaggttgacattgatggtaaatgcaataactgacccaagtaaactttctcagtaaagcttaacaaggcactatagctattaatagcaggcaagtttggtaccgctgttactgcgtaaataggagtcaaaacgaaggcattagccaatgacatcactgctgccattgcgataatcccaattaccaaaccacaaattggtttaactctgcccatcattgtcttgcggttatccgcactcacatttttacttaataaataaaatggaactgcaaatgacattgaagctaagaatgctgctagatttccaacaaggcttggtaatgcaaaaccactaaaaattaaactaagtaacattcgaattaaagcaataataactcccggtacaatgccaaaaataaacattccaattgtaataatgacatctgaaaaatcaaactttaagaaggcaactccaggcatgattggaaattcaaatttcataactacaaaagcaatacagccaattaaagcatatgcaatcacattagttaaactactattcttggatttagcttgatccataacttactttcctttcccaaaacaaaaggtctattgcttcagcaacagaccttaaaaagtgtagtaagtttttttagcctgtcttcttccatctagactttaactatcggtatctaacgattcaaccactgacgtgggtcgcggactttcaccgccggtcgggactttcaccctgccctgaagacaataaccttgaatatttaattacagttataatttagttcaattgcattaatttgtcaacttcatgcttcgataattcccgatattgccctgatgtaagcgaatccagagttaaaaaggcatatttttcacgagcaagcttatcaactaagtgacctactgctttaaacattcgcttaacttgatgataatgtccctcatgaattgtaatttggacaatttgtgtgtctttcttatgatcagttttcaatactttgaccttggcaggcgcagccttaaaatgatccaactttactccttgagtcaaggttttaatttcatcaggagttaaaatccctttaatcttggctacatagaccttagccacttcatttttagggtgcatcaataaatttgctaatttgccatcgttagtcattagcaataaacctgacgtatcataatctaatcttcctactggatacaaacgatatggtaaatcttcgaaataatcaactacagtttttctaccacgatcgtcttctgcagtcgaaacaacgccacgaggcttataaaacaaatacgtgtgtaggctttcccgctcaattggctcatcatcgactgtaatattactaaaagtatcgactttagtacctagcttagtaacaacatgcccatctactttaactcgaccggctacaatcattttttcagcttttcttcttgaagcgattcctgcttccgcaattactttttgtaatcgttctgccattttctatccctctttttctaaatgtttgtctgcgctaccttttgaatcgaataagtcaatctcctcaccatcagttgtatcctcaaagtcttcgattaacggtaaatcagccaaactttgataattaaaatattgtaaaaaataatcagttgtaacatacaacttaggatgacctggagcatcttttttgccgtcttgtttaattaatcctcgccaaatcaatgtctgtaaagctcctgatgaatttactccacgaatatcatcaatttctattctagtaattggttgtcgataagcaataattgagagaatttcaagtgctgattgactcaaattcttagttaaatctttttgaaaatacttttcaattatcttagctgtctgttgactagttgtcatcttataagtatttgcaatatgaattatttgcattcccgagtctggatcagccttcattttttgctgcaaacgagtgactaactgacctagctcttcaccatcaacttcaagtagttcaattagattttgctcctcaagcccattgtcacctgcgacatacaaaagagcttctaaatttgctagtttacttgccattcgtatcaattctttctaaatttaaatcaccgaattcacgtgcttgtgtaatctgaattaattgttttttacacaattctagtgtcgctaaaaataagccaataacatctgagatattctgcattttgtccgcgcaagcaaagaaactaacttgcctttttcgtttcaattgtccatgcaaaaaatccatcatctcattgatcggcgtttctgctactctaattgaagcggtatctggttgctgcaacttcaaacgatgtaagaccatcgtaaaagtcgtcgctaattcttgtgcagttatctgacccttaggcagcggttgaactttagcagtggttgatacactagcttctttagcaactgtaatcggtacttcttcattacgttctttaaaataagcagatattttcttaaacacagaatattgtaccaattgttgcactaattcgtctcttggatcttcatcaggttgaatatcatctacaaaatcgttttgaggcaacaaatactgtgatttaattcgcaataaagttgatgacatgacaaaatactcgcctgcaatttgtaaatttaagctttgcatttggcgcaagtattctaaatattgactagttatttgggcaattgggatatcataaatatcaattttttgcgattggatcaaatgcagtaataaatcaagtggtccttcaaaattcggtaattctaaagttaagttacttttgtccattatcttcttctatcgtttttaataaatttgtatattctggtacagcagttattcgtttatctggatattcgtgctttagttcatcaacaattttccgttcataactaatctcacgaaaaccaggagctaaagacaaatatctaataattacaaactgattagatacttgggttcctattacgcccaccatattattttgactattacgataaagatacaaaataaagtcattttcatcctgattaagcgtgatttcttcttttaagttttcgatatttttaaaatcaggtaaataggatagtaatcccattgctatcttctcataatcttttttatattgtattagcatttaatcacctaaagacgaggatgtgtcttctgataaacatttaaaatttgcttttgtgataaattggtatagatctgtgtcgtgctaatatcagaatgtcctaatatttcttgcactactcgcaaatctgcgccgttttctagcaaatgtgttgcaaacgtatgacgtaaagtgtgtggcgtgacatctttagtaattgccgccatttgacaatactttttgatcatctgccaaatagcctgtcgtgtaatcttttttcctcgattatttaaaaaaatatgttcatcgcttttccctacttgtaaaattagcggatcacgaacttcattttcatatttttttatccaatcaagagcaacaggactaattggaatcaatcgttctttttcgcctttaccaagaacccgaactaagcctaaatcgtcatgtaaatcctgcaactccaaattaattaattcgcttactctcattcccgtggcatataatgtctctaagatagcacgatcacgtatacctaactttcgtttagtatttggctgctcaagtagcctattcatttcagcttgagagagagctgtcggcaaacgacgttcttttttaggcaaatcgatttccaacattggatttaacttttgaatattttgccgagctaaccattgataaaatttacgcatgctagaaataagtcgactaattgagctggttgctttgttcaaatcacgctgccgagctaaaaacgcatccacatcgcttgcttcagttggccataaagccataccttcattttctacaaaagtttgaaattcttctaaatcttgacgataagcattaattgtattatcacttaatcctcgttcaacttgactatagcgtaaataatcatcaatttgatcttttaaattaatcttctccattatcgttctcttctggatccttaattaaagtaatcgtacctgctgttttatcttcttcaattaatccagccttgagcaaatgaccgaccgcacgtttaaaagctgattttgaaataccaaagtatgatttaatttcttgtgcacttgatttgtcatagaaaggtagagtcttggtttctcttctccgcaaactcatcaaaatcatttgcgcatcatcatcaatttcttcaaaagcacgaggcaaagcactcaaattcaaacgtccatattgactgacaccgactactctacccttgaattgctcacctagtctcataggacgtggcatctgcgattcatgtacaaagccaagataataatcactagttaaaacaaatgctcctatctctcgtgtaacataaaccgttgcaaagacattttcattattcattccacgtggaaagttagcagctaattggtcaaaaatattttcatctgctagcttagcccaaatacgatctttttcgtcagtttctaatcttactaaaagtcgatcatcacgtcgaggccatctttctttttctctaggaagatcatccattgataaaacaacgtctttatcaggtagacctacatcaacaaagacgcctaagcctggacgtacctcggttacttttccccaaccatattgatcgggttgcgcgaatggcaaaaattgtgtcatttctcgatcatgacttttattatcataaataaaaccttcgacttcatctccaattttaggaatatcatcttgcgtaatctcgatcttcttcaattcataagtcagtccatcaatttgaacataataagctttatcgttttcgtcagtaatttttcctttacgaactgttccaagcatttaaaaatctcctactttacatattcttacatataagtataagagatttttatgcaaaataaaatagccagcacttaagctggctattttttgattagctaatctatctaaattatattcttaaaattaaaggtttgagattttgccttggtagatagcaccacgacgagcgtcaacagtaatagttgaaccatcagaaatcttgtcagtagcgtcagtagcaccaacaacaactgggatacctaatgataaaccgataactgcggcatgtgaagttaaacctgaagcttctacaactaagcctgaagctttcttgatagctgggttgtagtctgggtcagtagtcttagcaactaagatgtcgccttccttaaccttgctatttgcttcttcagctgagttagctacaacagccttgccgataactgaaccgttaccaacacctaagccttgaactaacttgttaccgatgatttgtaacttcattaagttagttgtacctgagtcaccaagtggagtacctgcaacgataattacaaggtcgccatcctttacgtaacccttttccttagctaccttagcagccatttcaaacatgtcatcagttgacttaggcttttcagtcaatactggttgtacaccccaaacgatacccaatgagtgttgaaccttttcgtcaaaggtcatagcaataatgtcagcattgggacggtacttagaaatcatacgtgcagtgtaacctgagttagttgcagtaatgatagtcttaacacctaattcttgagcagtacgtacaactgattcaccgatagcttcagttacgtttgaacccttgtaagcttcgaatctttgaagagctaaagtattacgcttaagcatttgcttttcagtacgttcgtcaatttcagccatagccttaacagccttaactgggtaaagaccatttgctgattcacctgaaagcatagttgcgtcagtaccatcaagaacagcgttagcaacgtctgaaacttcggcacgagttggacgtgggttttcttgcattgagtcaagcatttgagtagcagtaataactggcttaccaagtgcgttagccttgcggattaggctcttttgtacaaatggaacttccataaatggaatttcaacacccatgtcaccacgagcaaccattaaaccatctgaaacttgcaaaatttcgtctgcgttgtcgataccttcttgagattcaatctttgggaagatcttaacgtagtctgcacctgcttcttcacaaagcttacggatgtctaagatatcttgagccttacgtgcaaatgaagcagtaatgaagttaataccatagttcaaaccaaacttaatgtcatcagtatccttttcagtaatacctggaaggcgaatttcaacaccaggagcgttaacacccttctttgaaccgattacaccagtgttttgagcttcacaaacaagttctctctttgagtcgtccttttccttgatcaaaaggtcaaccaaaccatcatcgattaatacgtgaccaccaacgtgggtatcatcgtataaaccgtcgtaggtaacgtggatcatgtccttgttacccttcttagtggcatccattgatacacggatcatgtcaccagtattaatagtgaacttgccaccttcttgttcagtggttctgatttcagcacccttagtgtcaaggtcgataccaagaagtaaaccagtatccttttccacttgacgaaccatcttcatacgagcaaggtgttctgggtggtcaccgtgtgagaagttgaaacggaatacgtttgcaccagccttagctaaagcagtaatagtttcaatatcgtttgaagctggccctaaagtactaacaatcttagttttcttcattattaaaaaaatcctctccaaaaatcaactaaattaatatttagtcatttcttcatttacatccaataacgcataatcaccttggtgtttaccgtcaaacaaatcaagaatgtcgtgggtattaagttcaccattctccatgccgacagctaaaccgcccttcccatcgagaagtaacttaacagcataattacccatcttagtagcattaactctatctgtaacagtaggtgagccaccacgttgcatatgcgcaaggacattagcacgagcatcaaagtcaccatatttaaggagttcgtccttaaacttatcagcagccataacgccttctgctaaaacaatgataccatgatctttgccatctgcaaaaccacgagtaagagtttctgcaatttccttaacatcgtatgaacgttcaggaattacaattgcgtctgctccacttgctacaccgacacgcatagcgatatcaccacattcacgacccattacattaacaacgaatacgcggtggtgactgcttgcagtatcacgaattttatcgatagcatccatagcagtacgacaagcagaatcaaagccgatcgtgtagtcagtataaggaatatcattatcgatagttcctggtaaaccaactgagtttacgccgtggcgagtcaaggctaaagcaccatggtatgaaccgtcaccgccaattacgataaccgcatcaataccgtgtttctttaattgctcaacacccttttgttgcacttcttcttgtgcaaattcagggaaacgagcactgtacaagaaagtaccgccttcactaatcttgtggtcaacattttccgtggtaagcggaacaaagtcacctgcaaccaaaccagcgaaaccataacgaattccaaagacttcaagcccatgatggatagcagtcttcgtcacagctctaattgctgcattcataccaggggcgtctccgccactagttaaaataccaatccgtttcatgaattcacctcatcatgattattttgtgtaatttctcacatcacataaatattaacattttttaggcaaaaaagctcacaaaaattgggctaatttatgctttctttccgtatttaagtttgttagcgagactgtaaaatagtttgtgtaaggatgaatgattccttaaatttatttctttaaacattagaaaaaggagttcctttctcgtatgattggtttgaacaaaaaaacacatacagaaagaagaactccttcatgaatgattttaccaaagattttgctcaagctctattcaatccagacaaaataaatgatttattgcgcaaagagctacaacaggctgttaataacttgttagaagctgaattgactgcctttctgggctatgatccctatgccagaaatggctggaatactggcaactctagaaatggtgcttatttccgcaaagttgatacgcaatttggcccaattgaagtgcaagtgccccgggatcgcaacggtcaatttcatcagcacacgctgcctgactacaagcagcactcggatatcttggaaagcatgattatcaagctttactccaagggcgtgaccaccagggaaatagccgatctaattgaaaagatgtatggcagccattacagtccagctcaggtatcaaatatttccaagcagatgattccaaaggttgaggcttaccacaaacgcaagctaagcgacaagtttttctgcgtctatttggatgcgacataccttcctttgcgccgagaaacatttgagcgtgaagcagtctatattgccattggcatcaagcctaatgggcacaaggaggtcattgactactgcattgcgcctagcgagaacattgaagtctggacagatatgcttcaaaacatgaaatcccgaggcttaaagcaagttgagctttttctttctgatggtgttgttggcatgaaaacagccttggccaggacttatcctaaagctcattttcaacgctgtttggttcatgtcatgcgcaatatctgcgctaaagtacgcgtcgacgatcgtgaaaagatcatgaacgaattcaaacaggtgcatcaacagacaaacaaagaagaagccacagctgtcctgcatgacttctataccaaatggggcaaggtttacagctatgttatcagaagcttgaaagacatagaaccagatctgctggtcttttataactatcccaagcagatcagagcttcaatttattcgactaacatgattgaatcatttaacaatgtgatcaagcgcaaagctaagcctaaggcagagtttccaactgaacagtcgcttgatgcttttattggcattcaggcaatgagctacaatgaccgttatttcaatcgaattcataaatgctttggtcaggttcaggacaccttagaatcctactttgattaaataaataattaaaaaatcaatttacgagaaagatctatttacacaaaagatttgacagtttcttgttagcacttacatccatcgtcaaagatagctttgtaatttgaactttattctttaaaattaacttttcgcaaattggttaagaaatactgttttttattttggtcaaatcgatcaccttgaaccttgactcctagtaaataaatatctccttcttttaaaatagagccaaatttttcataagccggtggaaaaataataatttcttgttcgctagatgtatcagcaaaactagcaaaagccattgtttttccatttttggtcctaatttgctttaacttcattaatttacccacgctaataccactatcatttaactgaaattgattcaatggtctagcgttaaatttttgtgcatatttttgtacagctattagaggagtagttgttgtagtaaagcctaaagctttctcttccatttctgctttttgggcagcagtcggtggctcagcaggcttaagtggtgcatcccccagaatctcagataaagacatattttgtcccgttaattgcacattagcaattacatctttgcagttaagcaataactcattgcgattatcttcgattgagtcaaatgctccagccataatcaatgcttcaattgcgtctacttgtaagaacttagcatcgattctacgcaaaaaatcattaaaagacttatacggtttagtattggcagctatttccttagcaaaatcaagacgtaatcctttaattgcttttaaaccaactaaaatcttgccatcttgtaaagtatagtctaattggctgtgattgatatcaggcggcaaaatacgaactccagcttcctgagcttgcatcgaatagctttgcgctttagcagacgttgatgaattgagcatcgctgtgtaaaatgcagcaggataatgaaccttcaaataagctagccaaaaggcaatcttggtatatgccaccgcgtgtgaacggttaaaaccatagttagcaaattgctctatataatgataaactcgctcacctacttctttaggatgaccttttttgaccgtaccagcaataaattttccacgttcttgctcaatgacattctgattctttttagacatcgcacgtcgtaaaatatcggcttcacccaatgaaaatcctgccaggatttgagctgtttgcatgacttgttcctgataaaccaaaattccataagttgattgtaaaatttgctttaaactgggatcaggataatgcacagtagccgtaccattttttcttgcaacaaatgcgtcaatattttgcattggacctggacggtataaagcgttcaccgctactaggtcctcaaaattgtcgggatgcaatttacgcaaaacaccacgaatcccaccagattcaaattggaagactgcatctgttttaccttgttgaaacagttccattgttttgggatcatttaacggaattgtattaggatctagctttacaccttgctgccgcactaaagctaaaatattgcctaaaactgtcaaattgcgcaatcccaaaaagtcgatctttagcaaacctaatgattcaacatattttttggtttgctgagttacaggaatgccgaaaggaccagcctgcaatcccgaaatgccagcaatcgaatcatcactaatcaccaatccagccgcatgaatagaataatgccttggcaatccctcaagtcctaaagcagtcttaaataacaatttattctcaggcgttgcatcaaccaataatcttagttctctagactcttgatatgctttttttaatcccattttatctttagagtacgggattgcgtgagtccacttagtgatttctggtcctgttaagccaaaaacccggccaacgtctcttaatacttgtttagcagccattgtaccaaaagtcaaaatttgagcagcatgatccatgccatacttttgatacatatacttaattactgtattccgttgaatatcaggaatgtccagatcaatatcaggcatctcatgacgagccggatttaaaaaacgctcaaacagtaaattatattggatgggatcaacttcagtgatacgcaaagagtatgaaaccagtgaaccacaagctgaaccacgtcctggaccagtagtaatttttactcggtgacaatagttaattacatcccatacaatcaaaaaataatcatcgaaccccatctgattgatgactcgtaattcataatttaatcttttctgatactcggctggaatacttttttgaccaaagcgcgcttgtaaaccagtttgagccaaataacgcaaatattcttctgaagtcggaaacttatcttgatgatatttaggtaagaccggtttttgaaagatcacttcagcattacatttctgagcaattttccaagtattattaattgcatcatccaagtcatattgatgatagcgttctaaaacattttgtgcagaatctaaataatgcgaaccagcttgcttagctagtggcaatatatcttgcaatttatctcccttagcaatcgcacgcaaagttttttgtaaaaattgctcacgtggccgtaaatattgactatcttccactgcaactaaagataattcaaattgcttagctaatccacggacataatcaatgtaatctatacttgcttttgaagcatatacacccaaataaagatcaaacgttaacttctttagttggcgaacataatcactgcctaatgcctgatttgtatcatgcagcgccattaattcactttttagattagctggtacgataatcaacaaatcatctaaatatttggttaattcattcagcgttaagaccttatcgttttgcccattttccgttaacaaatttaccgcgctagaaagtcgcaataaattatgatagcccttatttgttttggcaaaaactagcaaatcatatttttgggtgctatcaaccaaaccatttaaacgcagttgcatcccaagaagtggtttaattcccgcctttttagccaactcataaaaattgaccaaaccataagtcacgttcacgtcggctaaaccaaccacaggatagcccttctctttagcgtcttttatcaaatcacttaccttggttggactacttaaaagcgtaaaggagcttatgttttgaagtgctgctacttgcataaattaaccacctttcgtcattacaaacattaaattaagtataccaaattgaaccaatcaggtttgaatttgcgcttcatttttgataaaatcttacacgaaagaaggaatcattatgggtcgttatatcatcacaactgtatggagcgtaatctacatgttagttgtaggctttattgctggtcctttaacccgaagtgcttcattcaacggcacagatttaagaaattgtgtaatcgttgggatcatttttggtattcttttctcagcaattattgcgactattactgctcgttcacacaaagataatagtaaatacagtaagttaaaataattattcaatctattcaaaaaagacgtgagatgtttttattctcacgtctttttcgtttggtttagtaaaacttataattcttttttgtatctacttcgactggtccatgagtcaaatattcgctaaacatttgtacatagtccttatccaaagtggtttcaattttgtccatactatattcaggataaaatcccccacccatagcacgatagttgttaactgctaaatgataaatctgatcatctttgattggcttaccgtgcaaagttagtttagtcagccgttcacctactggtctggataaatccgcttcatattcgactggataaaagacgtcaaaatgatacaacattggcttaggcttaatccatcgatcaataaagccaatgtttcctgcttcatctttcttcaaaaagccagcagagtgctcaataatatgacgtaattctttaccagtcagcttcacacgacacaactgattagcatacggataatttaacaaaacatctctcatagtaatggtcttatcaaatcccttagcagtctcactcatcactgcagttgccgaaacatcagctttagtaaaccataattgcatttgctggattaaattaataaatggcgcgccttctattctgcctttcattgcattttcaattcgagcaggtttatctaaatgtgcaattggttgatctagccatttttgtgttcttttatccaagtcagatacaatatcaacaattacaggatcaggatcataatctttagtgtcaatcaacttagtggacattgatttgattttcttagtatcatcatcaatatcaagaaccacttcagctacagcttcaccgcgataacctggttgaacaatagcagtatcgcgtgtaaccaaatttaagcgccgatgctggtgacctgtcaataggacatcaacttctggaattttggttaaaatctgataaccttcattttcaccacgattaggttcagtcgccttaccagtttcaggatcactttcaaagccaccatgatacatcacagctaaaatatcaacctgagggcgtaatattttggcataatgcttaattttttcgtaagcagaggcaaactttaagccttttacattttctttaggttcccaatgtgggatatattgcgttgtaatccccaataaaccaatctttaagccatttctcttgataatagtgtattctctaccaaaaaatggaacttctgtttctgcatccagtacattatcattaatgattggtgcctcattgttatcaacatagtagcttaaataatctaatccaaagttaaaatcatggttacctaaacagcgagcatcataccccactgcattataagcttgcgtaaaaatacgtaaatcactataatcgccagttgaatgagcataggaagcaagtggtgagccttgcaaacaatcacctgcatcggtaactacaacattgttatcaccatactttttcttttcagatttaataactgagctaactctactcaaactaaaaggagcatgatagtcggttttattttggtaatcagttggcaataaaaatccatgtgtatcactagaatgtaaaaatactaacttcattatttctttttcctttttctaggcataaaaaaagacaccatatcaaaggtgtcctttaactagttattgctgttgtcgttgttatttacaacttgacgacccttgtaataaccctttggtgaaacacggtggcttaagcggtattcaccagtagttgcatcatagtgcattgctggaacactcaacttaatgtgaccacgacgtgaacgtttcttttgtttagaagtatgtcttgcaggaactgccatttaatttgatctcctttattgtagtcttaagcttcagggtcatataaccccgaatcactcacgtagttcaatcatactattcaattgctaataaatcaagatttattctattttcttctcttttttattgaagaaagtgaccttgtgatccgttttttccttagtatctcgtccaaagaaccaagcaataatcatcccgataatcaccattaccactaacacaacaattagtggtaacctcaccttaaaaaagccaaaattaattgcgacaggtgatgtatttaaaacaacaaaaattactgcaattaaagccacaactgatccaataattaaatttctttgtttttccatctttttttactttctagaagcaaactttaaggaaatcttatcaccaatcgatggaaatagattatacaatttagccgctacagctaaactaagtggtaaatttaattcacgtttatcactgccaaagaagtgaactacttgccaagcaacatcatctggatccaacataaattcttgaacatttttgacataatttccagtcttatctgctacattaaggaaattagtataaactggtcctgggtttacagtcattaccttgacaccaaatggctttaattctagccgtaagacatttgaaaattgaattacggcagccttagatgaactgtaagcggctgacttggtagttggtaccttgccagcaattgagccaaaattaataatttgaccagtcttttgttccatcatgaccctacctactaaacgagtaaagtacatcaaacctaaaacattaacttggaacatattggtaacgtcttgcattttttggtccataaattcttcgaatttaccaaaaccagcacaattaactaaaaagtcaatgtgttttacttgtttagtaattgcattaaaggtttgttcaatttcttccggcttacccatatctgttggaaaaacatatgcttcagcaccggatagttctttagcttctgctgcaatttcatctaattggtcctttcttctagcaattaaaattacagtagcaccacgaccagcactttcaagggcaatggaacgtccaatcccacttgaagcacctgtaattacaacaactttatttcttaatgagtctttcatttttctgagcctttcattggaatattaatctgatcaaaatcattaactaatactgtattagaaaatacttttttagcctgtttttcgagttttttccctttagcacccatataacgagcagaaatatgatttagacataataatttaacattatctttccgagcaattttggctgcttcaaccgaagtagaatgataataatcatgcgccaatttttgttcatcccctgcaaaagttgattcatggactaaaacatctgcatctttagccaaacgagcaatacttggcgtggaacgtgtgtcatagatgaccgtcacaattcttcccggtttagtaggtcctaagaaatttttaccatccaaaacagtaccatcagctaaagttactttttcgccattttttaatttccccaaaagtggcccattaggaacattatactgtgctaacttgtcaattaataattcgcctggatgtgaagcctccactactctaaaaccaaaactaggtatccggtggtctagttgctccgtatacactcgaaagcccttatcctcacagattaaccctgatttagctaattcaacaaaccttatagaatatgaaattttagtccgagataccttaagagctgttctaacaaattcttcaataccactgggaccataaatagtaataggaccaacatcaccttgaaaagaacgagttgacaataaccctggtaacccaaaaatgtgatcaccgtgattatgtgatataaaaattttggtaacttttcgtaatttaatatttgttcttaaaatttgatgctgagttgcttcacctacgtcaaaaagccagatttcattcaattcatccagcaacttaagtgcaacactagaaacattgcgttgctttgaaggttgcccagcaccagtacctaaaaattgtaattccatgaaaatcctattctaatctaaaattttgaatgcttaacaattgttttggtaactaatgcactatagtattttgagccctttaaattagggtgagtatgatcaccgtagaaccagtcaggatgattcttcgagtatgaataccaatcaattattataagattatgataccgttttgcaccttgatttagcaaattattcactgaattttgccaatctctagttggaacgtgaacattaatccagaaaacttttctcttaggtccagcctgatgcattattcgatcaagatcttccattgagaaaggtccattagttcctaaccctattaagatattatctgctaaaactccttgactttgataactatctaataagccaaaagcaacattcaattgtcttgaaacagcagcatcaattaacgctttaggcattaatcgttttaaatcgttgctcgaaccggccattaccgagtcgccaatcgcagttacttgaacatgttgagcaaattgcaaatctaactgggaaataccatatttaacaaaggatttgttaataggatgctttttagtttgaagctcagcttcacgaataattttagattttttttcttttttctttttttctttttttaacttttcaattaatttagcattatccgttttttgttttttagaattctgattaattcgctgtgctaattggcttttattaaagtcttctgcttttactcctggtgaaatagcaatagctgctgatcctaagattaaaatcaaagctgctaaggctgcttgacctttcttaaagtaatcttttgtttcaaaattaaaaattcgagcaaaatattgcttcgttttatcccaggtaatcctacccattggtctttcaatcaaacgataagtaatttctgtaatcactaaaattaaaatcacttcaataaggtgatacagcattggattatcaccaatatttaccttatcttcaaaaaagatcattactggaaattgatacagatagatgccataacttcgcgatccaatccaatcaaataacctattagttaggatttgattccaatgactaccaggatgagcaattaccgctactaaaatacatacatctaaagtaaataacaacatcccgccagagtaagtaaaggcttgttgtggattcatccacttagagaaaaacattgctaacattaaagcaaatgaagcaaggcccaccaagtccagtatccagcctacttttcgttcaacttgctgatttaaactctctatcggccaaacaactgctaatgctgctcctaatcctaaagaaaagaaacgagtatcagttccataataaattcgattaatatcagcctttaaaaagtataggattgccatttctaatgcagaaacagctgatagaccaactaaaatccagaaaatattttttttctttttaaccaatttaactagtaaataaatgacaattggccaaacaatataaaattggccttcaattgacatcgtccataaattagtaaatggtgattcattagctgcaaaacgctcaaaatagctttgaccattatgaatttgccaaaaattaaatacatttaatagatttgcaagtacaacctgatttaatttagccagtaaatttcgttgaaagataaagatataggctgcacttaaccataaaacagtaattaattgtggatataacttttttattcgactcaaataaaaatgacgattattatatgatcctgttttatcatatgaattaaacatatgatctgtcaccaaatatcctgagagcacgaaaaaaatcggcactcccagatatcctcccataaaggaattaggatccaaatgataaagaattactccgataactgctaaggctctaaggccagaataccccgtaataaacctattttttttcataccctatctctactcttattgtacgaattcaaagacaaacttgccaatagccacatcatcaccattaacagctcctttttcacgtagtgcgtcatcaacacctaaacgcttaagctttcttgctaaacgcataataccgtcttggtgatccaagttggtcatttgaactaatctttctaattgttcacccttaacgataaattcatgttcgccaacttgctcaactgtaaattcattcttttgtggtgcctgatacttatattctttaatcttttgtgctagcttaggttgttcttcagcctgttcttgttcaacttcagttactaagttggcagtatctgacatcaacttatctacgcctttatgagttacacttgagatctcataaataggttcattatttccttctgcttttaatgcttttttaaactcagctagtttttcctcagcaccaggaatatccatttgtgaagctacaatcaattctcgcttctttgataaatctgtttcgtaatttttgagttcttttttaatggtatggtaatcatcaattgcctcacgaccattattaggatccattgaaactagatgtagaattactttggttctttcaacgtgacgtaaaaattgaattcccaagcctacgccttgactagctccttcaattaatcctggcaaatccgccattgaaaagtcacgaccatctggcaagataaccattcccaaattaggagttaaagtcgtgaattgataagcagcaattttgggcttggccttagttgttactgataacagtgttgatttaccaactgacggaaaaccaactaagccgacatcagccaataattttaattctaagcgcaaaacgcgatcttcacctggttcaccattttcagcaatttctggtgcagtattaacactagttgcaaaatggatattaccgcgaccgccgcgaccacctttagcaacgactagttcttggcccttttcagttaaatcaccaatcaattcattagtgtcataatcatatacagtagtaccaactggaacttttaaataaagatccttagctgcacggccatattgtgatttaatacgaccattttcaccactatccgccttaaacttacgccgatagcgaaaatccatcaaagttcttaagccgctgtcagcaacaaaaataatactgccgccacggccaccatcaccaccggctggaccgccattagggacgtatttttcatggcggaaagccaccatgccatcgccgccttttccggcttgtacttcgattttagtttgatcaacaaatgtaggcatgtatatctcttccttccgtcttaatctagcttttaatactataccacagaaatacgcatgatatcgcgttttctcggattacaatgttaattttaccgtttgtgcttgagtaagcgttaatcctgctctacgcaagtcatcaattgaagcttctttaattttcttcaatgaaccaaattcgcgcaataatttgttacgacttttaggaccaattcccttaatcgaatctaaacgactggacaaagcatttttagcatggcgtcttctatgaaaagtaatcgcaaagcggtgcacttcgtcttgaacgcgcgtcattaaataaaagccctctgatttgggattaaggggaatcagtttcaaaggaataccgttgatgggatcgccaaataataaatggtttgttctgtgcttatcatctttaaccatccccgcaactgggatattcaaatttaattcatttcgtaaaacatctaaacaagcatcgacctgaatttgaccaccatccatcaaaatcaaatcaggcattcttttatgctcgcgcaacagtctaccatatcttcggcggacaacttccctcgtgttgcgtacttcgtcgccaccattttgatgttcaacctcaccttttagcttatatttacgataagctgttttttcgggttcaccatctttaaaaacgactaaagcagagactgggtcagcaccttgaatatgggagtgatcaaaactttcaataaagtgtccatatggtaagcctaaagcatcaaaaatttctttttgagcgcctttagtttttcgattacctagttctaataatctaaacttatcatctagctttaacttagcattatccttcgccatgtctagcaatgactttttctgccctcgttgcggtgttctaacaggtaccttcaaaacctcagctaaagtagcattatcaaatccttcaggaatcagaatttctttgggcaaaaccctatttctttgcccataaaattgcacaataaaggaagtgaaagcatcttctggatctgtggcatctgtcaaaggaaacattctggtttctctacgcaataactttgcttgccgtaaaaagaagatttgaacagaaatccaagacttgtcaacgtaataattaaaaatatcacgctgcgtattatcattggaaataattttttgtttttcaaccgtttcttcaatatatttcaattggtcgcgaatttcggctgctcgttcaaattcaagattgctagctgcttgagccattttttcggtcaaactctgcttaacactagcaatatctccattcaaaaagctcttgatctttttaatttgctcttcgtattctttttgtggcacttttttaaagcatgcacctaagcactgccccatatgatagtaaagacaaggtctgccttgataaccatgacagcgccttagtggaaaaactttttgaataaacttcaaagtggcctgggcagcatatacattaggatagggaccaaaatagtagccaccatccttatgaacgatactagttaaccgagtttgcggatcatgttcacgcgtgatttctatgtaaggatatcccgtaccctgctttaattgaacattataataaggttgatacttttttattaatgtaatttcaagtaaaaaagcttccttatcagttgatacagtaatgatgtcataatctcgaatttcacgaactaattcagcacgacgtccaacctgtttactcttaaaatatgagcgaacccgattttttaaatttttagatttaccaacatatataaccgtaccgttaatatctttcatcaaataacagccgggtttttctggtaaaagttttagtttattctcaattaattgtgttgccattatctcatctcactgaaaaaatttgcatttaatagtttaacacagactgtttaagaagatcttaactttgcttatagaaatagctattcggtacaaaagttgatatattaaaagaaataaaatttgaggagaacttttgatgactaatctagtttttgacttaattaaccaatttggctacctagccatcagtttgctaattgcaatcgaaaacatctttccccctattccatccgaagtaattctatcgttcgctggctttgcaacccatcattctcaaatgaatgtcttcggtgtaattattgcttcaacaatcggcgcggtagttggtgcactagttttatattggattggcactttacttaatccagatcgattagaaaagttgttcgatcataagttattcaaactacttggctttaaaaagggtgatgtacaaaaggctatcagatggtttgataaatacggtaccggtgcaatcttctatggtcgctgcatccctgtagttcgtagcttaatttcaattccagctggaatagccaaagttaaattacctaatttccttatttacactagcttaggcagcttactctggaatgctattctagttggtcttggttcctatatgggtgaaaattgggaacaaattgtgttaatttttgaagaatactcattaattattggaggacttattctaattgctttaatatatttttcctgtaaatggtataagcaaaaaattaaagctgattaattcaaacgctctataaaaaatatagagcgttttcttcttttaaaaattaaaaatatcatgtaaaattaatctaatctataataagggaagtttgcgaatgaaatttaatatttttaggaaacaaaatgttgagaactatctcggtaaagacattaagttctccaaaacaatgaacgccgttgatttaatgtctcttggcgtaggagctgtcatcgggaccggtattttcatcttacccggaactgttgcagccacattaactggacctggcgttagtttatcctttgttgttgcagcaattgtttgtgctttagctggaatgtgttatgcagaatttgcttcagcgatcccagtagctggttctgcctattcatatgggaatatcgtttatggcgaatttacaggctggattatcggttgggcactgattttggaatacatgctatctgtagccactgtggcagcaggttggtcatcatacttcagttctttcattgcaccatttggtctaaaaattccacacgctatttctggtcctatgaatcttaacaatggcgtttattttgacttggtttctgttttaatcattttacttatcagtatcctgttgtcacgagggatgaagaactcaattaaaattaatgtcgtagctgtttttattaaaatcgccattattttaatttttatttttgtaggcttacagttcattaaacctaacaactatcatccgttcttgccatatcatttttcaggagtcatcaaaggagcaaccacagtcttctttgcctttcttggctttgatgttgtttcatcatcagccgccgaggttaaaaatcctaagaaaaatatgcccctaggaattattggcactttagctattgcagctgtactttattttggcgtttcaatcgttttaacgggtatggttaattataccaagctaaacgtatctaatcccgttgcttttgcattgcaatatgttcatcaaaactgggtagcagagttattatcatttggtgctatgctaggaatggctaccatgatgctgacaatgatctattcaagctctcgcttaatctatgctatggcacgtgatgggctattgcctagtgcattcagtaaattagataaaaaacataactctcctcaaaatgccttagtcgctgtcactattattattgcagcaggtgcagcattcttctccgttgatcaactagccaatttggtcaactttggtacactttttgcctttactcttgtttcctttggaattctaaaattaagaaaaagaacagatattgttaacgatggctttaaagttcccggatacccatatttgccaatcatttctggtttaatttgtatctttatgatttgccatttaagttcagaagtttacttaatggcagctatttggttaatcatcggtgctgtaatttactttatttatggctaccaccatagtcagcttgatcatgattaacatcagtaaaaattatgtaaagaaaaagacgattcgcatgaatcgtcttttttagctctgtttgaactagttaatttgattaattgcctgaccatctttaaagaaagacaaaacattattcgcagcttctttagacaaattaaatctagcaatgtgagtagctgaaccaacgtgaggcgtcatgatcacattatccatttcaaccaattcaggtcttggatgcggttcgttttcgaaaacatctaaggcggcgcctgcaattgaaccattctttaacgcagcaattaatgcatccccgtcaatcaacgatccacgagcaacattaattaaaaacgctgtgtctttcattttctttaaaaagtctgaattaaccagatgatatgtttcagctgtagcaggagtatgtaaactcacaaaatcagcttcttttgccaaagtatctaagtcaacatatttagcatctaattctgctgcaatttgatcatctacttgatgacgattatgataaataattgtcataccaaatgctttagcgaacctagcaacttgttgaccaattcgacccatacctacaattcctaaggtctttccttcaatggagtacccttggttgtcgtactcatcggcatttaaaaagacgccttcacgcaaagcatcgtcataataatgcaatctacgagctgatgccataatcattgtccaggcaagttccgccgttggacgcaacacactcttagggcaatttgaaacaactattcctttttctttagcgtattcaacatcaacgtgatcaaagccaacgccataagttgaaattatttttaaatttttcgcagcatcaatcatttctcgatcaaaagccatctttgctacgatcacaccatcatattctgcaatatgatcaagcacccactcacgatcatcttctggtcgatgtcctactggaccgatatcaacttgacaaatattttttaaatcagttaaggcctcatctcttaagccacctaaaactaaaacttttgctttattcattatttttagacctctattcaattttcatcttaaagtaaaaataccactatttgaaagagaaaacatctactttaatattttattgattgcaactgcaacaccgtcgtggtcacaatcagccgtaacttcgtcagcatgttgctttgtatattcaacagcatttcccattgcgatacctaatccagcataagttaacatcggcatgtcgtttgcttgatcgcctagggccatcacattacttcgatctatttttaagtagtcacatagtcttttcaggccagtccccttatcgacaccggcagcggttgcttcataataaaaaggctcagtctttgaaaatacaactcgatctttcatcatttcaaataaaggagattctattttatcatctaaatagtctggatcatcaacatacatacatttgatgattggtatctgcttcatttcttcttgtgtacgatatgagacttctaattttacgacccgtgaattataaattgtataatgtcccaaatcacggctagctgtataaattcgatctaacgatacgctatgaaaatgtaagtttagctttcgcgcaattgtctctaaatctacataatcttcatattttagcccctgtttgaaaataacctgccccgcggttgattctacaactgcaccattaaaactaactacatactgattttcttggccattaagccctaattcatctaaataacgttgagtacctgacaaaggccgacctgtgcaaattacgatttgcttgccttgtttttgagcagtcaaaattgcttttttaactgctggtgtaatctccttcttagaattaactaaggttccatcaatatctatcgcgattagcttaatttcttccattaccttttcccttaaaacaaagaaagcaccgcttatgcgatgctcctattaaacagccatggtctgcgtattttcttttaacttgaccaaatcagccatatcatcagcactgatttcaaaatcgatgttcaagttttcctgcatttctttaacattatcactcttcggcaaaacaatacaacctagctgtaagtcaaatgctaacattaattgagctggactaacatgatacttttcagcgtaagtcctgattcttggatcctttaacaaacgaccatgtgcaagtggagaatatgctttaatctgaattcctaaatttttacattatttcatcaaatcagttggcacatttcctatatgaacttcgatttgattaactactggcttaattgagctgttattaacaatgttagctacgtcttcttgtaaaaaatttgaaacaccaattgatctaactttaccggctttaagtgcttcttccattgctctccagttttccagattgccttcaaagtgacgatcattaattctattcacttcaatccaaggttgtggtgaatgaattaacaacatatcaatatattccaaactaaatcgatctaaagcgtcatcaattgcttttttgtaccttcatagtctttaatcgaagttggtaatttagttgttaaaaaatatcactactctcaacatcagagttccaaataccttttcccacaccactttcattgccatagtctttagcagtgtcgaaagcgcggtaaccaacattaatcgcttgacgaattacttttcgtacatcatcgttattaattagccaagttcctagttgaattcgaggaacctctactccgttattgagcattaaagttttatcagagtacatatatacacctctacattttactaatatgtctctgtttcttaattcctgtatttatatagctaataacaattattaaacaataattgtttttttcagccatctgttaatagcatacaacaaaattgttgcaaatcctatacatacattttattttttgtggttctgttatattttctaattaaaatagtagcatcaatcaatgctgctaggtttataaagattatcaaataatttattttattattctatacaaaattaatattttcgtataaaaaaagaaagggctgatgatgtcctatcaactctttctcttcagtctcttaattcccaacacctataataccagcatttatcatttaaacaaggataaaaaacatcttttacttactaaatattatttttagttttcacattatagttttcatcacatttttaaaaagtctagatgttatattacaaaatgattacaagagcaatataaatcatatagttcactattagctatatgcaaatactatattttttgagcaataagctgcaacaatttttgagcaatctttcgcttactcattttaggccatttcttagttgacttatttttttgtaaaatcgttacctggtcttcatcattgccaaaaacatttttagaaacgtcatttgctacaatcatatcggcaccttttgaagatagcttttttgcagcattttgtagcaaattattcgtttctgccgcaaagccgacaactatctgccctcgctgcttgtggctagcaacttcgcgtaaaatatctgtcgttttaactaaagttagagtcaaagtttgttgatcagcttgcttttttaatttatgatctgcaacttgtttcatgcgccaatccgctactgcagcagccataattaaaacgttactatgcttaaattcttttttgactgcaactaacatttcttcgctactagaaacatgaattaatgtaatcctaggattttgtggcaaaggcatacttacattaccatatattagctttactttcgctcccatcgctgctgcttctgtagctaaggaaatgcccattttcccactagagcggttaccaataaagcggacgggatcgattgcttcttcagtaccaccagcagtaataacaatattttttccttgcaaaacgttctgttgttcagtgaaatttttgatccacgccacaattgctcctggctctggcattcgtcctttagcagcatagccttctgccagcatccctactgcaggctccattatttctacaccatgttctttcagaaaagctatatttcgctgtgtagctggattattccacatttggtcattcatggctggtacaaccaatttaggtgcacttgtagctaaaattgtagtgctagctgcatcgtcagcaattcccgttgccattttagcaataaaatttgcagtcgctggtaaaaccagagctaactctgtccaacgcgctagatgaacatgtggtatgctagcctcattttccttgctccataaatcatccaaaacaggatactttgttaaagctgccagtgtattagtagttacaaaatgctctgcatttttagtcattactatttgaacttgatgacccgctttttctaaatcgcggataacgttaactgccttataatcagcgattccacctgtcatataaattgttattcgactcattttaccattcctcgtcatctaaacttatttttattttatcattgtccacttaaatagtagacccggatttaaaattgaagtgcaacactaagtgttaaacaaaaaggccatgaagacctaaacttgaagtgacgaaaaatcaagaaaggaagatctttatgaccaattcaaattctagcatttctaagcactatcatcaattaaccagcgtacaacgtggacaaattcaagcaatgctggattccggcataacttcccgtactgttatcgctcaagaagtcggctgccataagtcgacaatcagtcgcgaaatcaaacgcggaagtgtcctgcaaagagacagcagctatttattgtatgagcactattacgctgatactgcacagatttattatgagaagcgtcgcaaaaactgctatcagcgcaatccattgaagcattatgctgtctttttgagaatgctctccagacgctttaaagctaaatttgatgccaccagcatcgatgaattcgttggtgaattcaaaaggactatgccaggctacccttgtcccagcacaccaactgtctatcgctatattgatcagggcttgctggacataagcaatattgatctgcctatgaagctcaaaagacgcaggaacaagcgtcatcacggccatagcggtcatgctttgcacaagaagcatcttggcaattccattgaacagcgtcctaaagagattgaagacagaaaaacgccgctgcactgggaaggagatctggttaaaggcgtcagacgcaagaatcagcctgctttaatgactttgaccgaaagaaccacacgctttgaagtagttatcaagattcctgactatcgggcaagcacatgccaaaggctgcttcaaaatgagattgacagacatcctgcctggtttaaatcgatcacgtttgacaatggctctgagtttgcggatatgaccgagatcaaaggctgccagatctacttcgcccacccatattctccatgggaaagaggcaccaatgagaactgcaatggacttctgcgtcaattcttccctaaaggcaaaagcatgaaagataagtcagctgcttatgttcaacaggcaactgatgccattaaccgcaaacatcgtcgaatccttcaatatcacacagcagaagaactcttcaagcaatatatttcctcatagcctaactgttgcacttaatttgacaattcaggcttaaatagtagaatattgtgttgggagttatatttggaggaaaaattgaaaaatatgcaaaaactacttttactaactatattcttacttagcttatcggcctgcactaaaccacaatcatcctctgtaccacgtgataaaagtgccactacaatcaagattgttgataggaagcttgagttgcatcagcccactaaaaggccacttcaacctttaaatggaattttgcctcattggctgcaaatgccagataaatctcagcctaagccagcaatttatactaatttgaatactgttcttaaaaacaaatagggaaatgattagtttcatcttccctatttttgagactgtaaaatagtttgtgtaaggatgaatgattccttaaatttatttctttaaacattagaaaaaggagttcctttctcgtatgattggtttgaacaaaaaaacacatacagaaagaagaactccttcatgaatgattttaccaaagattttgctcaagctctattcaatccagacaaaataaataatttattgcgcaaagagctacaacaggctgttaataacttgttagaagctgaattgactgcctttctgggctatgatccctatgccagaaatggctggaatactggcaactctagaaatggtgcttatttccgcaaagttgatacgcaatttggcccaattgaagtgcaagtgcctcgggatcgcaacggtcaatttcatcagcacacgctgcctgactacaagcagcactcggatatcttggaaagcatgattatcaagctttactccaagggcgtgaccaccagggaaatagccgatctaattgaaaagatgtatggcagccattacagtccagctcaggtatcaaatatttccaagcagatgattccaaaggttgaggcttatcacaagcgcaagctaagcgacaagtttttctgcatctatttggatgcaacataccttcctttgcatcgagaaacatttgagcgtgaagcagtctatattgccattggcatcaagcctaatgggcacaaggaggtcattgactactgcattgcgcctagcgagaacattgaagtctggacagatatgcttcaaaacatgaaatcccgaggcttaaagcaagttgagctttttctttctgatggtgttgttggcatgaaaacagccttgaccaggacttatcctaaagctcattttcaacgctgtttggttcatgtcatgcgcaatatctgcgctaaagtacgcgtcgacgatcgtgaaaagatcatgaacgaattcaaacaggtgcatcaacagacaaacaaagaagaagccacagctgtcctgcatgacttctataccaaatggggcaaggtttacagccatgttatcagaagcttgaaagacatagaaccagatctgctggtcttttataactatcccaagcagatcagagcttcaatttattcgactaacatgattgaatcatttaacaatgtgatcaagcgcaaagctaagcctaaggcagagtttccaactgaacagtcgcttgatgcttttattggtattcaggcaatgagctacaatgaccgttatttcaatcgaattcataaaggctttggtcaggttcaggacaccttagaatcctactttgattaaataaataattaaaaaatcaatttacgagaaagaactatttacacaaaagatttgacagtttcctattttttgttcaatttacaagttgctttaaaaatagttgttttatattaatgagtaatttaaaatttatataatacagaaaggaactttatatatgccaaatttatccagtgatttaacttcaactattaatgagagactaaacaacttgaccgcatctaaaattcgagcatttgaccaaaaggtctctgaaatttctgggattattaagttaactattggtgaacctgatttagcgacacctgatcatattaaagatgccgcaattcgtgatattcaggctaatgattcccattatgctcctcaagctggtaagccagaactacttgaagctattagcaattaccttgaccgctcaattggtgtacattatgatccaaaaagtgaaatctgtgtcactgtcggtgcaacaggtgcattaaatgatgtctttatgaccttgcttaaccccggtgacaaaattttggttcctactccggtttgggctttatactttcagctaattaaaatgactggagcaatccctattcaagtcgatactaaaaaagatgacttcatcttaacagctgaacatttacgtcatgttctcaatggtcgcggtaaaggtgcaaaggcaattattttaactgatccttctaatccaactggccgcgtttattctgccacagctctaaaagccttagcagatgtcattaaggaatacaaaatcttttctgtaactgatgaaatttatgcagaacttgtttatggcaaagccaaacatcactcactttctgaatacatccctgacagaaatattttgatttccggtttatccaaggcttatgctatgactggctggcgtttaggctatattgctgcccctaaacaaatcatgaagagcatccgcaagattaattcatttttagttacttcagttactgataacgttcaaatagctgctgtcgaagccttaaacaatggtcaaaacgatcctaaaaaagcacgtgaaatctacgaagcacgtttaaactttatgcaatctggcttagaaaagttgggctttgaaatggccacaccgcaaggagcattctacatttttgctaagatccccgaaaaatatggcaccaatgatgaacaattcgcttttgagctggctcaaaaagcaaaagtcggtgtcactcctggtcgctactttggcaagggcggtgaaggttatgtccgtctttcttatgcatcatcaactgagcaattaaaagaaagtttagctcggattagtaatttcgttaataatttataattcagataaaaaaataagtgatctcaattaaagcgagatcacttattttttattatattgatttattacttatcccaagttgaattttctgcagcatcttcagcagccatcttttcaagacgctcttcggttgcctttacactgtcttggtacttttcctcaacttcgatccccaagtcagctaattgttgatcagctactggagctggagcatgcatcattggttctgaagcagaagcattcttagggaatgctgaaacgtcacgaatattatccttatcagcaagcatcattgcaaatcgatcaagaccgatagctaaacctgcgtgaggtgggaagcccatgtccaaagcatccatcaagtaaccaaattgttcatatgcacgtttcttagtgaaaccaagtgccttaaacatattttcttgaattgagcgcttgtggatacggattgagccaccgcccatctcatcaccattcataacaatatcataactacgtgcgtgagccttatgaggttcagtagttagcaacttaaccccttcatcatctggcatagtgaatgggtggtgagctgctacccaacggccaagtccttcatcgtattcaaataatggccaatcaacaacccaaacaaagtcataaacacccttaggaacaataccagtttctttggcaaattcacgacgaaggtggtcaagtgaatcacaacataccttccacttatcagttacgaatactactaattcgccgccttcaagatcaaattccttcttcaaagcttctttgttctcatcagtcaagaagcgagcaacagggcctgaaaattcgccatcttcaaatttaacccaagccaaacctttagcgtggaaacgtttaataaagtcagccttcttgtcaatcttcttacgtgagtattcttttgcaccatttttaacagcaattcccttaacaaaaccgccatcagcaattgcaccggagaagaccttaaagtcactatccttgaaaattgggcttaagtcatgaatcaacataccgtaacgagtatctggtttgtcacagccatacttgttcattgaatcagtccaagtaattcgcttaattggagttttaagatcaatgcccttgacatctttcataattttcttcaaaagaccttcagtataactctgaatagtttcttcatcagcaaatgacatttccatatcaatttgagtaaattctggttggcggtcaccacgtaggtcttcatcacggaaacaacgagctaactggtaatacttgtcaaatcctgcacccattaaaagctgcttgaacagttgtggtgattgtggcaaagcgtagaaactacctggatagattcttgatggtactaagtagtcacgtgcaccttcaggtgatgacttacctaagattggagtttcaatatcaataaaaccattttcatcaaagaattcatgagtagcacgcaaaatctttgaacgtaaaataattgcttgttgaacttctggacggcgaagatcaagatagcgatactttaatctagtttgttctgagacttcaattccatctttaatttcaaatggagggttcttagccttgtttaaaataatgatttcagttgcatcaacttcaacttgaccagtcttcatgtcagggttaacttctgaacgcttaacaactttccccttaacttgaacaacatattcattaccaagtgaatcggcaatatccattaacttcttaccagaatctttgttaacaacgatctgaaccaagccttcacggtcacgcaaatcgatgaaaaccaagttacctaagttacgtacacgttgtacccaaccatagagatttacatcttgaccgatgtatttttcagtaatattgccacaataatctgttcttttttcgatcttttccattgttactagtccttcaattcatccattattttagtcatgttatttagatcttcaagacttaaatcgattgtcttgccatcagctaaacgtttaatattcaaaacgccgttagccagttccttttcacctaaagtaataacatacttagcaccttcacgatctgccttcttgaattggttctttaacttcttctgattgacatcaaagtcagcttcaaaaccttgattacgaaggctacgtgcaatttcaattgccttttgtgcagtaccgtcaccaatattagtaataaagaaatcaataccgcgtttctcgaataatgcaggattttgcttttcaagcactaacatcaatctttcttcgccaatcccgaaaccaacggctggagtagcgggtccattgaattcttctaccaagtgatcatatctaccaccaccaagaatagtagttgcactttcccataagctcttatcttcaaccataaattcaaagataattccagtatagtaatcaagtccacgtactagatcatcatcaattacataatcaataccaagttgacctaacatcttcaagattgcgtcaaaattagcttttgaatcgtcatccaaaaattcacgaatcttaggtgccttaggcaagaacttcttatcacgttcatctttagaatctaaaatacgcaatggattatcacgcaatcttctttgtgagtcttctgataactcatctttcaaaggagtgaaataattaaccaaagcatcatgataatcttgacgtacttgctcattccccaaagtgttaatgtgaagttggtaattcttaacgcctaactcacccaataaatcatgtcccatcatgattgtttgtacatcacttaatgggttgcttgagccaaagctctctaccccaatttggtgaaattcacgttgacgaccggcttgtggtctttcatatctaaaagttgattccatataaaaaacattaaatggcttaacaacttctggcgcatacatcttgtcttctacataagcccgcactacgcctgctgttccttctgggcgaagggcaatatggcgaccacccttatcatcgaagtcgtacatctgtttttcaacgatttctgaactatcgccacttgaacgagcaaagatttcataattttcaaaacttggtgtgcgaatctcacgataatttgcgcgattgaagaaatttctggcagtttcttcaactttttgccatgaaccagattgatcaggcaaaatatcaactgttcccttaggtttttgaactctcatttaatcatcctttttatattttgataacttgattaaaaataaaaagcgcccttgaacttaatcaagggcgcttagattagcacggtaccacctttttggttgctgcgattaacgctcgccaaacgatccattatctgttaaaggtgtcacagaccgcgatctatctactctctcaccacaacgagcagtctctttgaatagatcattgctaatccacattctttgtcatcgataattcttacttagcttatatttttctcaagacattgtcaacctttgcggtctcattttttcgctaaagatctaacacaatcgtgaatggaccatcgttttctaaactaacttgcatgtcagccccaaactcaccagtctcaacgtggaaaccgtcattttctagttcttgattaaagtcttcccaaagttctttcgatcttggtggacgcatcgcatcaacaaaactaggacggttgccttttttagtatttgccatcaacgtaaattgtgataccgacaaaatttctccgttaacatcctttaaagacaagttagtcttcccctcctcatcttcaaaaatacgcattttagctattttatcagctgcttttttgattactggcaattcatcaccatttttgatgccaactaataataaaaagcctttaccaatcttgcccacagttttaccgtcaatatctacttgagcatgatttactctctgaattacaactcgcattaattatctgacctcttagtttcgtatacgtctggaatatcacgtaatttactcaaaatttcatctagttgatctgcattccgtacagcaactgtgacatacatatgtgcaacattatcttcgtttactttaccagagatattattaatattcttagtaagtgagttcaacttattaataacgtcactaagcagattggaacgattgtaaccaaagacttcaatatttgcattaaaggattgaacactattttcctcaacattttcccattcaacatcaattaagcggccttgttcttcagcttctttggtgatattacggcaatctgttcggtgaatagttacaccgcgacctttagttacatacccaataatcttgtcacctggaactggattacaacacttagctaaatgaagcattaagtcactaacgccttggatcatgacgccatttttatgcttaaccttcattgtagtatttgaattcttcttaggttgttcttcttgaactgcttgttgtccagaattcaaaatcttttcttccagctctttttgtttttgattttcttcctcacggcgcaaatcaaccgtcaagcgattaaccactgcttgagcagaaagatcaccaaagcctactgccgcatatagttcatctgcagtgtgataattaaagtgctctaatagcttttcaattcgatccctggccataaattctttgggtgaaagatcctcatcgcgcaacatatcagcaatcaattgttcaccatgctggatgctatcttctctatcctgacttctgaagtagcgtctaatcttgttgcgtgctcttgaagtcttcaccatgtcaacccagtcacgcgatggcgctgcattagtctgtgtcataatttcaataacatcgccattgcgtaatttatagtccaaaggaactaatttgttattaactttggcacctactgcatgactaccaacttgagtgtgaattgcataggcaaaatctagcgtaaccgaacctttaggtagttcatatacttcacctttaggcgtaaaaacataaactctgtctgaaaaaatatcacttttaacagacttcataaattcaccggcatctttagtttcatcctttaattcaaggatttctcttaccatatccagcttttcaccagaggtactttgctcaacaccagtaaaattgccacgcttataagcccagtgtgcagccacaccatattcagctactttatgcatttgttcagttctaatctgaatttctagtggacgaccgccaggcccaataatggttgtatggagtgattgatagccgttaacctttggcatagcaatgtaatccttaaaacgacctggcattggcttccattcagtatgaacagcacccaaaacagcataacaatcacgcacatttttaacaattacacgtacggccaataagtcataaatctcatcaaaatctttatgcttattaaccatctttttatagattgaataaatatgcttcggacgaccataaatttcatatttaatgcctaattcatttagagtcttcttcaaagtcttgattgtatcggcaatatatttttcacgctggcttcgcttgacatccatcaagttaacaatgcggtaataggcttcgggatttaagtagtggaaagacatatcttctagttcccacttaattgtcccaatacctagacgatcagccagcggtgcataaatatccattgtttcggaagcaatacgccgctgcttatcaggtcgtaagtgttgcagagtatgcatattgtgtaaacggtcggctaacttcaccataattacacgtagatcttgagccatggcaatcaacattttacggtgattctcagctaaaaattcttgatgagacttgtactcatatttgtttaacttggttacaccatcaacaataaaagctacatcttcaccaaatttttccttcagctcatcatttgtaactggggtatcttccactgtatcgtgcaaaaagcccgctgcaactgtatcaggatctaagcctaatgtagctaaagttccagccacttgcgttggatgaataatataaggttgtccagacgcccgtttctgtccagcatgagctttattggcaaattcatatgctttttcaacaaaggccacctggtcatcattcatatactttttgcaggtatcaattacctgatcatgcgtcatttcaatgtatttggacattatgatcatcccctctagcggtaaatatttttattcattaagccaaaagcttcaattattaagtaaattaaaccaaacattaaattatacaaagcaaaatgtggcaacattgctaagcagaaaagcacaggtaacaagaaaatccaccacttggacaggttaagtttaataaataaattgcctagatggtatgcaatgatgctgttaataataaaaaacagaattgcttctcgccacactaccggcacacggcaaatgctaaagatatacggcaaaatcattaccaaaatactccaccagacaagtgacatccagcgatgagaattcaacttcctgacaattggaattgcttcgattttatttcctagttttttcattaaaagattgtgcctctcatcaaagtttaatttaattgataatattttaccatatttatttttcttttctagtaattgctagtccaatccagcgaccttgacgcatggttaaatcgaccttaaagccattctcgtctagagccttttcaatcttaggcaattgcaggtagtcaattccagaaaagataacttgaccatcgtcgtttaaatgactatccatttgtggaatcaagtctagtaaaatttctgccaaaatattggcaacaatgatgtcaaacttgcctttaacatcagctaacaaactagtcttttgagtgtgaatattattaatatcgtttaaggctgcattttgtttggctgcagtcattgattcatctgaaatatctgtggctaaaacgtcagttgctcctaattttgatgcagcaattgccaaaataccggaccctgtaccaacgtccactacattcattggcttaaccattgctctctctaggcccatcattgctaattgagtagttttgtgatttcctgtaccaaaagctaagcctggatcaagcttaattaattgctggtccttaaaagcgggtttgtaatcttcccattcaggcacaattgccaagtgacgtgaaaaatcaatcacgtgataatacttttgccatgccgtgttccaatcttggtccttaatgtatgaagttgtaattttggcatcccctacatctaggccatagctcttcaattcctttaacttatcttggaatttttttactaatgcgtctttatctgcttcttcatcaaaataagcatagaaatatgtatccttaggtaagtctttaatgtcatccatttcaactacagtagaatcatgcaaccagcctgcttgctcaaagtcgctacgctttcttgattcaatacccaatgcattcagattatctaaagcaaaaacgctcaaagcgtcttcaacttcatgactagtatcaattttaataattagtaatttcattaatattatctcctttgggattttcttggcataatgctatcatgataacaggtgataaatatgtcaaagaagaaaaataaaaagaacaaactcgaaaaaacattggtcgaaaaaatcttagaccaaaataaaatcaagtatcgtcaagctcaatttgctgtctccgaagataaaggcggagttgcacaaatgaacacttctattttagaagacaaagagcgtttagtctataaaactctcgtctgcgaaggaaataaaactggtccattggttggtgtcgtaccagttactgaacatttaagcatgaaaaaattagctaaagtttctggtaacaaaaaatgtgaaatgcttcccttaaagaaattagccaaaacaactggttatgtacatggcgctaatactcctatcggaatttattttaaggaaaagtttcctatctatttggatgactctatgcaaggaaatcctgaaattggtgtttctagtggtgaagttggccgcagtgtctttttgaacccagaagacttagccaaattctgccatgctccttttattgatctaaaagaataaaaagcgcttacaatttattgcgttattcttcttcttttgtgttatagtaaatatatgtaccgcatacagaatataacaattacatagaagaagatgacaaaaatgaatatattgttaggaattattggctttgtagttaccatgatcgctgcctttgttgttacggcattagcaattgccaagtaaataaagcgaaaaaataataacagatttaaaatgacgtggtttgatatcatgccattttttattttctatataatagttatttattatcaaattataaatatttaatatataaggctaaactatttatactaaaaagaaagtttttgcctataaaaaagtcaaatttatatcagcaatgttatttatttgtgctaatctaatatgttgtcaaatgtaaaaagaacacattgataataaattgtaaaagactcagtcttttacgttcccaaaagaaggtttagataaattaaacacaaaaatgatttgagcttcaatacaaaatttaatggaaaacaaaaatttggttttagaaagttgtctgttggtttagctgcagttgcacttagcactacttttttcttaagtaatagtcaacttgttcatgcggatactaatactgcgactaatgaagaacaaactcaacaagattcacaaaaatctaatcaagaacagtcaaataataccatccagtcaactcaagctgatccaagtaaccaaaataatcaaagttcagctaaagattcaccaaaccaagaaaaaacaaaacaacaaacagtcgaaattaccgcttttcatacagatgaaaaaggtaacaacgcttccgaaataaaaaaagatgaatcagcttctttaatggctggtcaaggattgcttaaagagaccaaaacattctcatggaacggccaaattaaaggtagttctgacagtgaaactgaacaaactaaaactattagctacgtaattaaccatatctacgctaacggaagtcaaaaatctaacactccatttgcatctgatgaagtcatgctcaaacttaaatctgaagattcgggccaaagctggactcaatattctattgataatggcaaaacttggaacgctttagcccaagcatatactgtcacagtttctcctaataaaaacgctaatgcaaaatatgtagcagacttagttaatattgttactcctgataaaattagactcaataatcaacaccaattcattattgcttcatcaactccagacggtactcactatgaattaactattccttactacataactcaacatgcagatgtcagattttatgatgacactgataaaaccgatcaagcaatcaataaactacttaacgataatgggtttcaactctcaatgactagtgatgaagctggtcaagggcttagtgctgattaccaaaataaagacgaccaatcagctaatacccctattcaatttagcagggtagaagaagcattagctttatttaaaaataagcactataaaattgaaaaagtttctggcgccaatgccacattaaaaacggacagcagtatcggctttggcaactttgataataatgaaaatgtagatcaacacttcatcatttacttagttcatgaaacgcagatagaaaagcaaactgctacagttagggaagaagtaaaaggctactatgtaaacggtcttaagagccaaaacttttccggtataaataatccagatgtggctgttcctaaaaatgatgaaacacctactccaaatgtagtaaaagaagttatttactctagaagcagggttgttgatttagttaaggatccgcaaggcacagaaacaaactggtcacaatgaatatcaaacaatcaagcattttcagctattccgtataacaatactacaattaaagacataattgatggccattatcatttagataaaaatggcgtggttcacattgcttcttcacagaataaacttactgctacaagcaattcaattactgggatttccgtaattgcacctaattcggagtttttagcttcaattgcttctaccacagttaatggtcaaaaaacaacaactggcaatctagcaactattagcatttgggtaccctatagttactccgcttctaaaccggaaccaaccccaactcctattcctacacctgaatctgagactccgactactccagaacaaccgaagcagccttctgagccaaataagtctgaaccacctaagtctaatgaatacaaacagacaaagattcacaaaaaagtaaattggaattctagcagtcatccttatggcactgatatgcaaagacagaagcaacacaaagatggaattattccaccccatggaactgccattaataatattccaaattcaacaacaaagactagaactactaataatatcgttaagtcttacaataatattagttctaaattaccacaaactagtcaaaataattctaacctgagcttaatcggtctagctttagcagcactaggactactgggatttactattacaaaaagaaagcatgattaattaacaatagcaaactaaaagagacagacaaaaaatccgtctcttttttctaccttaatttatttaatctgcatgtctccacttcttatcagttaagatacgtgcagctaaaagacctaatagcaaggccacgacaatcatcaacgcttctacgatccaataagctccgatattaatattcgtgattccaaagttaaatacagctcgatacatgtaaagaccaggcaccataattacaattgatggaacagtaattgcaattcttggaaaaccaacttttttccttacaatacttgctaatagaccagctgttaaagcaccaataaatgctgccaaagctggagcaacctgagcataatcgaccaagctaagacgtaatgtatttgccattgctcccattaccgcggctgtagctgccatttgtggtcgactgttaaacataattgaaaaaccaaacaccccacaaaagctagccagcaatcgcaagcaggttaaagtccctggatcaatttttaacttaggcatagatcctggatgcaaacgcaaaattgttgctacagcccagcctgccatcgttgcaattacgataattaaaatcgcataagtcagccgttcaagcccagagcgcatatctaacttagacatgtccaatccagatgtaataaatggaaaacccggaattacgaacaacatggcaccaatatagccataggcatgatcatgattaatgtggaataatatttctcctacatgaaaactcataaagtaaacactgcaggctatggcaaccgcaaccgcaatcttggctaccaaagttaacctgtgcttacccataattgctctaatatattgaccgcaagctgcacccaagaaagcacagatcacctcaggaagaccgccgcctaataagaaaataaagccgccgcaggccaagcctgaactaagtcccgaaattaacggagaatacgctgacttttgctgagaaatctcccgtaagcgtttatgaatttgaccgatagtccattccccatgtcccttttcaaattgccgaacgaatttttccatttcattcaacttagtcatattcacacctgttgctggtaacgataaagtctgggaatatgattcattatcaacatcaaaacaggtatattcaattgacactaatccaatatccgttgaacaggtaatgcccaaggttctggcaaccgtatccattgaatcacgtactcgccaagcacctgtaccacagcttaaaagcataatacctactcgacctacaatcgaggtcttttcaactaatgttgcatcctgcgccatcgtattattatcgctcttgaaaaattcctcccacagaatcttcatatgatgtttttctgataaatgatgttctcgatcaatttcactcatgctattattactttccctcacatagttcgcataattataaccattatattctaccacaggaacttcatcataatttttgatattttaaaatttgctgctcctttttattattttaaatttataatagacatataagttattttgaaataaaggatgatttaaagtggctcaattaactgatgaacaacttgctaacattgctcatgacttttaccttagtcagcttaatattgctgatatctcacaaaaatatgatttatcgcgatatttaatcgctaaagcactagaagacgcgcgtaaccgtggaattgttaaaattaaaatctcgcgtggaatcaaacgcaatcaggtactagagagagaatttcagaaaagattcagattaaaagaagcttttattgtcgaaactaccggcaaccgcgatgaaaatagtgaagccgtagttaacttcgctgctaaacaaattgaaacctatctaaagcaagcaaaaatcgctggtattagttggggtgcaacaatgcatggcgtgatcaacgacttttttgagcaggacttagagcaactttactttattcaattacttggtcaaccaattaattctaaccgcaggaagaatccattggcccaagatgcagcagaaaaattgcattcccatagtctaagtctgccaaccccactttatatactaaatccaaagatcatgcctgccttgaaacatgagccttattttaaagtaattgaaaattgttatcatcacttagacatgcttttcactggtcttagtactttccaatcatttcaagctaatcaatttttgaaagaaaattatggacctgaactatttaaagacattcctgactgcgatgtagctggaatgatcatgggacgaccatataatattaaaggtgaatttttccctgacttcgaacaacacatttgtggtatcagcatgaatgacattatgaaaacgccaattcgtttttgtgtcgtccgcaatcgctttaaatctgaggcactccttggcgccttacgtagcggtatcattactcatctagtaactaatgatgcaattgcccaacgcgttttgcaaaatatcgattaattcgctaaagtaatacagagatagactatttataatgaggagaaaaaatgaaaaaatctaaatatgatttatggattggtgcactgaacctgatcaattgtgtgttattcattagctcttggtttgccatccttggagctgacttcactgctagaatagctttaatattttacttatttgcctggttcggcgtgatccttaatgccgttgcagtagtgcaatcgcataacatgaatatctcaccaattgggccaattttaggagtaattggtaatgcactatatggctttaccgctgctctagccttacctgctgtgattgttaatattatttctgccttctttatctttatgcaacatagcaataaaaaatagaaaaagcagccaaaaattggctgctttttctatgctaaaatttgttatgtactggttaacaattactaaagttggatttacaatgactgggaggtgagcattatggagtttagaattgatgaatgtattccagatgttgtatcaatgatggctttagcacaagcaattgcaaattttgacctcaatggtaaaaagccacaagatgtgaacctaggaaggatggcaaatgtctaaagtttttcgaaatgacttaaaaataaaggacatccctaatcaaagaaaacttagggatgtctttttttagcctaaatatgaaattgctacttgtaattgtgccagcttcattgccgcctgagccacattcttgcgatcaacatcaacaaaaatttcacagtgtttttcatcaaattcataacctgaccctagcgcaatatcttccgcagtttcatataactctttatcttcctcattaggatctagcttaaatagaattcgtccgccatcactaacgcggcaatgatcatcggcttcctcaacccaaacatatacggtatcgccataagaatcaatcatcattgtggcaatctgcaatgtcctatcgtcaacccaaattgtcttggttaccttagcaacatacgaacctatttcatggttaattttctttaattcatcctgcttcattttttacctctaatttataaattcttttctttaatataaggataccctcttagcaattcttctacaaatttattaaatagattggatctcccaatcagcttgactgttaccgcttactaattataccttgtaaatatactaaattttggagaaaaatatgcatactaagggtttatcagttaaaaatgttgtagcgatcggaattggatcggcaatctatgttattttagcacgtttcacatcgattcctacgcctattcctaacacaaatattgaattagtctttccttttttggctctttttgcgtcaatctatggcgctaaggtcggttttattgtcggctttattggacatgctttgtccgatttcattatgtacgggcagacttggtggagctgggtattagctactgctgttttaggctggatcatcggtttagcggccaaacgcttagacttaaaaaatggtatttttggtattaaacaaataatcttttttaatatcattcaaattattgccaatattctcgcctggattgtagttgcaccaatcggtgacattatcatctatagcgaacctgctaacaaagtttttgtccaaggaatttcggctacgctttctaatggtattacaattatggtcattggcacgctcctacttaaagcttatgctggaaccaagattaaaaaaggcagcttgcgcaaggaggattaaacaatgcctaaaacaattattgaattcaaagatttttcatttaagtatgacagtcaggccgagccaacactaaaacagattaatctaactatcaaacaaggtgaaaaattgttaattgctggaccatcaggttcaggtaaatcgaccattggccgctgtattaacggcctaattcctaatctagatactggtgagatcaccggtgaatgcactattaacggcaataatattaaagacactaacctatttgatctttctttcaccacctcaactatcctacaagatactgacagtcaatttatcggcttaactgttggtgaagacattgcttttgctttggaaaacgactgccaaccacaaaattatatgaaacaagttgttcatcgctgggctgatgaattagggattgagcatttattaaagcaggcgccacaaaatctatctggtggtcaaaaacaaattgttgctctagctggtgtcatggttgatgaatcaccaattttactttttgacgagccacttgctaatttagccccagcttcaggaatgaaaacgatggctttaattgatcgcattcaaaaagaattaaatgctacagtaatcattattgaacaccgtctagaagaagtttggagtcagcctatagatcgcattatcctaattaatgatggtgaaattgtagctgataagaagccaaatgatctattacatgagaattgtttagaagacgttggtgttcgtagtcctctttatttaaatgccttaaaaaaagctaacgtcgaccttacgcgtattcccgacctaacttcagtcgctgctttgccccaagatcctgaaattgctaagcagttgcaagaatggcaaaacaacattaccctaagtggtgaaaaagaagagactcatcctctattagaactcaaaggcgtcggccaccgttatagtaaattgcagattcatcctttacatgacgttacagcgacaatcaatcaaggcgattttgtttcaatagttggtcaaaatggtgcgggaaaaaccaccctttgtcgaattatttgtggctttatcgacaatgagggacttattttatttgatggtgataaccttaagcagttttcaatcaaagagcgttccgataagattggttatgtcatgcaagatcctaaccagatgatttcccaaaaaatgatttttgacgaagtagctctaggcttgcgtctacgtggttatgatgagcagactattcgcactaaggtctatgatactttgaaagtttgtggtctttatccgtaccgcaactggccaatctctgctttatccttcggtcagaaaaagcgagtcacaattgctgcaattttagtgcttaatcctgagttattaattcttgatgaaccaactgcagggcaagattggcaaacttatactgagatcatgaactttttaaaacagcttaatgatcaaggcaaaacaattatgattatcactcacgatatgtacttgctgatggaatacactaacagatccctggcttttgctgatggaacactaattgctgacacagatccaatcaagttattaactgaaaaagctttaattaaaaaggctgctttgaagcgaacctccttatataatctcgctatcaaatatcaattagaaaatccagatagctttgtccgcgcctatattgatgcagaaagggatgaaaaacatgcataatgaaagccaagttttaggttatcaacctggtgattcttttatttatcaattaaacgcaaccactaagttagtttttatgctcctagtctcggttgcttgtatggtaacttatgataccagattcttaattgctatctgtattttatcaattttcttgtttaaagaggcaaaaattaagtggagtcagatttcttttatcgtgaaatttattgtagttttcatgttgctaaatctgatttttgttttcatctttcagccaagctatggtgaaaatatttatcattctaaaagcatcttgatccatgccggctacttcacattaacattgcaagaggtattctacttattcaatcttttcttaaaatatgtctgctcaattccaatcgtattgctgtttctattaactactaatcctagtcaatttgctgcttcattaaataaaatcggcattagttacaaaatttcctatgctgtttctctagctctacgctacatcccagatatccaaaattcttattgggatatctcagctgcccaacaagcacgtggcaatgaactatccaaaaaggctagtttaggcaaacgaattaaggggacattgaatatcgtgatgcctcttatcttctccagtttggatcgaatcgatacaatttcaacagccatgcaattacgccgctttggctcaaagaaaaaacggacctggtatgtcacccaatcatttaaaaaagctgattatcttgtaatgatcgcagccgtgattttggtattaattgtggttggtctctggcaacttgatcatggtagattttataatccatttatttagaccaaaattaaaaggacctaatggtccctttttggttttcgatttttctgtttatgatcatcttgagtgacaatctcaggtttcttaggaatcggcggcgtgattatttcataattatgcaaacggtgttcaagatagtcatctaatcgctcttgcgtattttcatgtacaataatcattaaatcgcctcacttttcataattatacctcaaaaatgtaggttaaacagcgtaattactaagtatgtcattccactagcaatcacaggacctgcagctacacccttgaaaaccactactccaataatagtacctaaaactaatgcaaccgtcacctgtggcaccgctgctaattgatcaacaccataacgtgacaagatagctacagcaattcccgctaaaatggcaatccatccagctggcgacttaaaagttttaatcagatccttaaagccaatctgtcctgtcgcaataggaactagaattgcaaccgaaataatagttacgccccaattaatcccctttgcttgaatagtaggcagccatttactagtaaacggtaataatttaaacaccattaccactcccgttgcaataattaatgacatgtttttacccaataacgctacaactagcaccaatgctagaaataaccaactttccatatttatctcccctcaaaaaatcattagcattagttcactttaacaaaaatattcatcaaaacaaaataatgagtctaaataagtgaaaatcaatctaatttgtgtcataataaaattactcagaaaaatatatgtatacgcgcacctcgttcttaaaacgaggtgtttttttacgcaaagaaccaatgcagatatttcacctacactggttcttcttagttgaccgatattgcgatgtgactttactactgcatcgtagttagaatttgcaaatatttatgcttgaaaataaaatatttgcacaaataattaaaaaacgtttcttgcaaaaatacaacttaacattttaataaaaacaaaaagatgccactttcgtgacacctttgtgattacttattcatacatttcgttttgaactaatccctaacttccttaatggtatcaatgatagtaccatcacgatactcaactaaggcaaccgtacgatcagtatattcaagtggctttggtacaccaacttgtttttcagccattttttgcaattcattaatatccaagatcttaagtcctggcaccttactaaaggcatccactaaatcctggcgagctggattaatggcaattcctctttcagttactaaaacatcaattgatgaacctggagtaacaatagtttctactcttggaacaacagtcgcattacgtccccgaacaagaggagctgtaataatcgtcatcttggcaccagctgcggaatcttggtgaccaccgacggctccacgaatgacaccatctgagccagtcataacattaacattgaagtcagtatcgatttgtaaagctgacaagattgaaacatccaagttgttaaccactgcacccttattatgaggatcagcataccaagaagcatcaatttcttgttgatttttattgttagccattgattgggcagcacccttatcaaagtcctgcacatccataacttttctgactagaccttcttcaagtaagtcagtggtaggtttagtaataccacccaaagcaaatgatgcagtaatgccatcatcaatcatactttgacgtaagtacctggtgacagctaatgcagcaccaccagaaccagtttggaagctaaacccttgcttgtaatatggagagttaatgattacctggttaaccatttgagcaatcttgagttccttaggatccttgggaaagcgagtggcaccagaaccaatcttgtctggatctccgactttatcaattttaaccacataatccacttgatcttgctgaattgacgcaggcgtatttggataatcaacaatattatcagttaataaaacaaccttattagcatagcgagcatccattagggcatagcccaatgagccgaagacagcatccccatcttgaccgttagcattacctgcgggatcagatactggcacacccaagaaggcaacatcaaccttaatctcgccttcttcaattgaacgagcacgattaccatgtgagcggaaaattacaggattcttcaagccgccatgtgaaacaaaatcacctagtgaaccgcgcatacccgaagaagtaatattagtgattactccctttttaatcgctccgataactttatcattcataacaccagtaagtgaacttggagccaaggttaaatcctggtaacccatactaataatcttgtccattaccaagttaaaaacataatccccatttctaaaatggtggtggaatgaaatagtcataccatctttcaggttattcttgattacctcatcaagtgaatcaataatcttattttgtccagtagtaactcttacctttggagcaacccgcttaacttcaggatgaccaatttcagtagtttcaaatggtttcaaattcatttttttcattaaatcatctggtaattcgcgttttactttattctccaatgtagttaccttctttatcaatcaagttagaagctttcgctgtttccaaaaccctggtagccttttctacaactggcttatcgatcatcttaccattaagtgaaataacgcctgagcccttagctttggcttcacgaatggcattttcaacattcttagcttgctcaatctcttctttagttggattaaagaccttattaaccatttgaatttgacgtgggttaaccaaactcttgccatcataccctagttcatggatatagttagtttcacgatagaagccttcagtatccttcatatttgagaacactgtatcaaaggcatatacgtctgcggcccgagctgcttgtaaaaccatgttacgcgcaaattccaattcgcgaccatctggataacgatgagtatgcatatctgcagtatagtcttcgccagataccgccaagcccatcattaaaggcgttgcggttgcaatttttggggcatttaagacacccttggctgattcgatggcagccatcacgccaatagaaccattttcaatgtcaaattcatcttcccaatgttcgatatcctttaccaatttttgaatcattgcagctgattcagttttaggcaagcgaataacgtcaacgccggcttttaccattgccttaacatcttcatcgtaaaatggcgtgtcttgaccattaacacgaactacaatttcactgccaccgaaatcgactgtcttaattgcctcatagaccaacattctggcagcatctttttccgttaatgaaactgagtcttccaaatcaagcataatcgaatctgcaccataaatgccagcatccttaatcatagctggattattaccaggtacaaacatcatggttctacgcaaacgattcttaacgtatgtcatttagagcacctccaaatctggcttgtctgaagtttcggttgcacgttgtgcagctgctaaagtacgagccttaattacacaatccagtgctcccttatcggttgctttaaccttggcattttctaagccataagcttttaaggtgtcagtaatcaccttttcaatctgatctccataggccttttttacttctgattcaaggtcaatctcaatgccgttagaaccctttgaaatcatgatttggatatctgaactctcaagtgttcccgcaactgctgtggttttaatttccattaatattcattcctttctcaattttagactgcaatttctgcatgttttgcttaataaattcataagtcgtttccggcacgaatttattgatctcttttaaattgccatccttgatcagctgtctaactttagtggcagtaacaatttgaccgtctttttccaagcgatcaattacgattacttcaatctcaggaccaagctcatgcgctaggctaacattataaaagtgagtcgttcttgaaattggttctttaccaatataacgacgggtaatgttcagtcctggtgcaatttgattcttaaagacagctgcgtctatcaccgtttgtacagcaattaaatcgtcaggtgattttaagaagtatgctggaaaagtagctggtgaaaccatgtagtctccgccagagattactttcacattactaaactccttagtaccttcttgcaccaatttgaagcgctcatcaaagctaaacaaagaaacatcattagccacaacaaagacataaaccaaatcgttttcttcactagccatcttaatcaaatgctgatgacccaaggtaaacggatttgcattcatgactattgcagcgaccttcttatgctcttgatctgctatttcgggcacttcagccacaaattccttcacatcaggcgttccattttctaaaaaggctgcctgatccgtcttggctaacaaattgaagtgcaagtgctcaaagctagttgcatactttgctttagtaaagacaaaggaatggaaaattccatcattagtcaaatattgcgttaaggctgtaaccactttattaaagcgagccccctgcgtatcggcatcattcttgactccgatatactttaagacattaccagccacactaccagtaccaactaaattgccttcctcatcttctagcccaatagtatgatcaatcacgttaacttcgcgttcactaaaatcatttaaccccaatgattccaacaagttttcccatttttgcctagttgtagcgtcgtttaaaaacaaatcaacgactttatccataaatatgccaccttgctatttcggtaatcgttttcacaaatatagtttactctcttagtttgattatttcaatttatctattaattttttaaatttttcaaaaattcagcaataatctcatgcgttttttctggttgctcagcctgaggcaaatgcccacattccggtacaatcgccgtttgaacatcttgattcagcatttttatcgcttgggtaaattctggattaaaaaatggcgattttcccccagcaattaccagcatgggaaccggcgtatccaaaatcatgtcacgccaatcttgctccgcatgttcaactaaacagttatagttttcggctggatcatatgggaattcttgatattcctttttagcagccaaaaacattttttcatcaatgtgatggtaaaaagccttgccaaaatcaaatttaagcatgtcaggataattatcccaagttaggtctttaaagccatacttccagctcttatccgcaatcatctttggtgactggtctaaatcaaccattgcctttagtctacctttgccataaattgacaaatatgcccaaatattggcggcccccatagaatttccaatagctactacatcatgcaaattgagcttaactaatagctcctctaagtcaactgcatgacgactaatccgctgtccacgataggttcgttcggactgtccttgattgcgtggatcaagcataataaaacgataatcatttttaaataaggcaattaaatcttgccacatttgacaagatccccctatacctgggatcccaatcaaagcaggcttatcttcatcccccgtatcggtataatgcaaaattacatcgtcattagttttaaatttcatctttaatcttctttcattttgattactcaattctattatgacgcaaaaaaagcaacctggtgattcccaatgtcattaagttaagacattgacaattaatattagacttttaaagcactgatttaacatttaattggttaaattggtgcttttttcgtacaacaaataaggcatagcacagattctgcttttttaagctacgcgatataaataatatacagctgatttgggcttaatatttctcttgtccttgcggcctggtctaattggaatggtataatagctgatctgaataaggatccgttcaaaatcttgcgttaaagaagaagccaaatacatgctctgaataatcaagcatgattgcttgaaattgatggcatattgatacttgcaatgcttttgcggaatataggcctgtgcatcaatttgactgattgcattaaacataatcatatgggcataaatttccatttcaataaatttatcttgtttggaatggaactgtacactgcctaaagaatacttcaatttcttgaaggaggtctcaataccccaacgcagatgataaagctctttaattctttttagcggataattttttcgatcaagattggttagcacaacttcccattcttctttgcctgatttggcatcattaattctaaatttgcaggctcgaaattttattgtgcataactcgccaaaatcccagcttagatcctgggtatttttagagcgatacttaatatattggcgataatgatgctggacatggtgaatattctcactggctttatgcgtgatgtagtaatagttagaagtagttaccaggcaggaaatctcacgatcacattcttgatcaggcaatgtcgttatttctttaactccgccttgtccagccttagttcgtattatgtaatgacagttaggcaggcgattgcagttttcaatcatattgaaactagtgtagccacgatccattgttacaatatatggaccacaattcaaagctttaagcatttgaacagccgctttgcgttcatccatttctgatttaggctgaaaaatacaatcctggtaggtattattcaatagatcatataaggcattaacgtgaatttgacaatagggtttctttttatgagaagaagcttgtacaatgttattcgatttcggattccagatttgattaaagtcagagccatcaatggcaaacaaacggtagtgatgatcaaaaagttgaatattaaatagattttgattaaaaacagtcagaatatgtttaaaacaagcaggagaaagctggcttttgcgttgaacataggcagaagtactaactactttatcgttctttttagttgcatcttcgccaaaagctctaaagagttcactgtttaaattctgaccttgcatgttaattgtagttttaaggactgtcgctgcatctaaagtgcgtttcctggtaaaagcatgaggattattaataaaatcgtgaatatgatccccagtattattgataatttgatcaagacgttctagaatattcttatgaagggctttcataattaacaccatctttctggcaataattttgaaggtttaaaatatataatatataagataggcgaaaaggctggtcttttcgcctttattttatacaaaaaaagagatcgaatccaaatgattcgatctctaaaaaagcacccttaattgtcaatgtcttaacttaatgacattgggtgattccagattgcttttttttaccataaaccaataatcttcatccaaagaactccgacagttccaaaaataatcatatagattaatccaaggacaaaattcatcttccaccattcaccttgtttaacatagccagtagtagccaaaattgtggcaggaccattagcatagtgagtggttgatgcgttgattgcaccagtaaaggctaaaagcattgcggaaaggcctaaaggagcaccagttgcaaccgcaacagacaagaatggcaaataaagagcagtcatatgtgcagttccacttgcaaagaagtagtgggtgtagaacaaaagcaaaactagaattgccaatacaaagccccagctaacaccatgaagactattttgaactaatttggagaaccaatcaataaatccgtatgaaatcagcttaccagccatgaacatcaggatagaaagccaaatcaagatattccaagcaccagtttctttcagagcatcctgcattgttaacacaccggtaatcatcaaaatagttacagccaggaaggcaacaaaagtcgcatctaattgtgggatcttaaagaaactagacaaaacccataaaacaattgaaagaatgaagactgacatcataattttttctggagttgacattggtcccatttttgctaatttttcatcagcccatttcttagcatctggagtttctttaatctcaggtgggtacatcttgtaaataacaaatggaatgattactgccaatacagcaacaggtacgattgcagtgaaaaaccaacctgcccaagacatttgatagcccttttgtgcggctaattgttgagccaccatgttaggagcagcaccggtaataaacaaagccgttgataaaatattggcatgaaaggcagtaaagtcaatgtaggcaccaatctttttacgagaagcatcatctggcttagaatcgtagccttcttttgaaacagattcaacaactggccaaacgaccccacccgtacgagctgagttcgatggaattaaggcaccgagaattaattccaatccagtaatcgcataaccaatacccaatgacttcttaccaaatttttgaatcataatataggcaatacggttacctagacctgttttactaataccatgagccataatgaaggccatagcgattaaccatgcagcagagttaccaaatgaactaagcacgccttgattaactaccataccttttgcatttgtaacgtccttcattggtgctaagccaactaaaacagttactaccaagccagctaaggttgtaccaccaattggcaaaggttttgtaatacaccctacaattgtggcaacgaaaacggcaaacatttgccatgcctgaaccgaaaggccacttgggcgccatggagtaatacaccacaatacaattccaacgatcaaaggccaaataaagcctttataattcactttttctaaagttttcataagaatcccctattctctatggacgatacacatcatcaatgatgtcaaagcctttatctgctaagcttttatctacccaacttaaatcaacttctcctttgctaaaggcaattgctttagcctcatcctgctcatgaaaagcttgtgccttaggcaaaatctcaggagcatctttacgtggaatacaaattactccatcagcatcccctaaaatcacatcacctgggttaacactaacattcccacaagcaacaggtacatttatttcaccaggtccttctttatatggtccacctggggtagtactggttgcataaatcggcagtttccaatttcttaaattatcaatatcacgaattgggccaccaattacaatacctgcaattttcttttgatcgcgtaagtaagacatcattacctcaccaatcaaagatctagtgttatcaccctcgtcgtcgatgacaatcacatcgcctggctggcaatactttaaagccgcataaattgctaagttgtcacccgccctggtgtgaaccgtaaatgctggaccaaccatttcctcatcaggattcgacattaacttaattctaggattcatagcacaatttcgttccatgcaatccgcggtattagaagctgggatctttttaaaaccagctacaacttttggatcaggcatttgcctctttaaataaattctttttcctacaggcatagagtagctctcccctctttatgctccctaatctatcttgttattgttaaacaagcctttttataaaaactaaaactcatcacaactcacaattagtattatacacttatcaacagattaagcggttacaaattttgaattattttgattttttacttattttttgaattatttaaactcaaataattatgcaaaaaaagtgtctgggaaaaaactaattctcagacaggaaaaaagaacgatgatttcctaatggatttcatcgttctttttctatactttaagtgccttccttgatattattgaatcaccacaaaacaaaaagaaagaaggcaatcttaatgtatcaaaattataccataggtcaaacagctttaacactcaacttagacttcgctattcctcataatcatttggctaataccattagctggtttgtcgattcaattccagaagatgtcttattgggtaatactgctaaaaccggtcgtccagcttatcatccagcgatgatgcttaaaatcttgctttttgcttattccagaagagtattttcaggcagaaaaatcgaattaatgctggaagaaaacgtgccgatgatggctttggctgaacaccaacagatttcttaccatactatcaataactttagatccagcaagcatgccaatgagctggttaagaaaagcttcctctactttaccaatttgttagaagccgagggccttatcaatgaaggagcgatctttattgatggcactaaaatcgaagctgacgccaatcgctatacttttgtttggcgcaaggcagttgaaaaatttcatgacaagctcaaaggtcaagcggttgagctttatgatgaattgattgccaaagaagtcgtcaaagcaatggcaaaagagaaagtccagaccagtcaaggtttggcagagctagcacaagaaacggaagccgagattgaaaagctgaccgaagaaattgagcaagaacccaaagcaatccctggcggttcgcctagaaaagcaagaagacgcggtcttaaaaagctgcttcataaactaagaaaagactatgttcctcgaatgaagaaatatgaagaggcgaaagaaatctttgcagggcgtaacagctattctaagacagatcatgacgcgactttcatgcatatgaaggaagatcacatgaagaacggccagctcaagccaggctacaatattcaagctgccaccactgatcaatatgtggttgactttgctttataccctaatccaactgatttcagaactttcgaaccatttttaaagcagatgacgacactagacaagtttgacaagattgtcgctgatgctggttatggcagcgaatataattattcaatgttagaagaagagtattcagacaagaagtactatattccttataccatgtacgaaaaggaaaagaccagaaagcatcgcaacgatccgactaagctggctaactggttctatgatgaaaaagatgattattaccttgatcaaaatggcgtcagattcaacttcaaatattatagtcaacgtaaagatcgatcgactggtcaggttcgtgattttaaggtctatgaagcagatgaatttcaactaacgccagaattagaacgcttagccaagactaagagcggacgccaacgtcaggttcgctataatcctaactggcaatacctaaaagaaaaagccaaagcagttctccaaagtcctgaaggcagacacatctacagcatgaggaaatatgatgtggagccgatttttggacatttgaagaacgtctttggcatgcgccgaactcatttcagaggcaaaaagaaggttgaaacagatataggaatagccttcatgatgatgaatttaagcaaatattggaacagaagatggtcaaaagaccaattttctttgttcaaaaataaaaatagacagaaaaagacggtcaagcaactcaaattaagagttggattgatcgtctttcagtatctaagggttagttttttcccagacactttacttgatctttgttattttgatcttattcaccaaagttttcccaaggcattacgtcaacagccggttgatcaactaactcttgcaattcctttggcaaaaattccttcttcacaatcacatcgtaaacatattgttcaaaccaagcttgactcatttcgtagaagcccttgtgaccaaacttgtcgccccatgagttttcaaccttccacttacggatatgaccgttgtcttcatcaacaccgactaaagtcatatcgtgagtagcaaagccctcaccagtattcaaacgatcagccttgctcatttgcgtatcaacgtcaaataattggtcagtcttgtacaattcagtatccaaaaagccagtttttctttccatttgcttcaagacatcgttaccaaagctaactgcttcacctgacttaagttgagctactgcagcttgagctaagtattcaattggcacattcaagtatttgacttgatcgccgccagccacattgtcataaagtggcaagtggtaaaccttgttatattcatggttaggaatgttggacaaagcaacataatcatcgaagttgaagtccttaaagtatttttgaacaaatgcttgtggagtcaaatcacgctccaaatggtacttcttatcatcatcacggtattccaaatcaaatttctttggtggttcacccaaggcaactgataccatgcgataaatttcgttcaagaattccttcttggtcttttctgcttcatccctcttgccttcattaactaatttacgcaaaacaagagcgtcttttctctccttacgagctaagttttcggctaaagcagtagtattattagtattaaagctttctggcattgcatatgaaggtaccacgccatactttttaactaaattaatggccatggtccaaaggccaccatcttcaccggcaaactcaagccatgcttgaacatgacgatcagttaaaggtttatctgccaaacgaataattgcattgtaaaaagcgttagcacgttcaatcttgtcccagaagaaattataagcttgtgagaacgtaaaatccttgaccttgttttccttgccaaagtagtggcgcaaaacattcaaagtagtgaattcccagcaacgaccagaatgcttctgatcagttacaccgccaatatcaagttcagttgaaaagacatggttaagtcgttctgatacgcggtcattaaatgaagcttcaagcaaaccactacgacgagcagcacgagaagctactttattctcaggattagaattaaagctttcagaaaagccttcaatttcttgttgtgaaataactgtcatgatatacctcgttaattcttatcttttaattttttattaatcttttcttatataatactattttctagcttttttgtcattaagaaaaagtcctagtttttgacaactagggcttttaataaaattaatgatcaattaaaggtttatacctgacaaaacttcttgcatcttgtctgctgagttaatcatcttagcatgctcagtatcggaaagcttagtttcaattaccttttcgatcccttcaccgttaataacggttggggtacctaagtaaagatcatgcttaataccgtattcaccattaatcggagctgaaagtggcaaacaaattgcacgattgtccaaaatagctgagacaatttgagtaagcatcattgcaacaccgtagaatgtagcacctttgttggcaatgatcttgccacctttcttacgcacatcggtctcaatttctgctagaacatcatcgttgatttctgagtaatcacggagtgccttaccagcaactgttgattcatcaaagttttcaaaactagtatcaccgtgttcaccaagaaccattgagttaaccttagcaactgggacattcaaacgctttgaaagttcaacacgaagacgcattgaatcaagtgaagtaccagtaccaattacacggttcttagggaaaccagacaacttttgggtcaaagtcgtcaaaatgtcaactgggtttgcggaaacaacaaagacaccattaaatcctgattcaactactggcttaacaatactttccaaaatcttaacgttcttgttaaccaagtcaagtctagtttcacctggcttacgaggaacaccagcagtgatcacacaaacgtcagcatctttagcatcactataatcggctgcaggatgaatattggtttgacccataaatggcgtaatatcttcaaggtccattgaatcaccaacaggacgatccttagctacatcaaaaattgctaattcatcaacaattgtattttgcaataagtcatttgcaaaagttgaaccaacagcaccatcaccaacaagaaatacttttctactcataagttaaattagtcctttcaaatgtttataaactgttttttatctacatgattaattatacactaagcgctttcattagacacgatttattccataattataaattataatatcccatcaaaatctcgccagtgttattatttctatcgaaaaagagcagttaaccaaccgctctctttacataatctttcttatattatttactttcacgaacatatttagccatctgaatacctgcttgacgaccaaaaataactgtttcggcaattgagttaccaccaattcgattatttccatgaagtccgccagatacttcaccagctgcaaataatccatcaattacattaccattagtatcaagtacttgagtttcagtattaatatgaataccacccatagtatagtgaattgctggatgaacatgaattgcaaagtatggaccacgatccagttcacgatccatcccagtcgttctgccaaattctttatccttaccagttgcaacggacttattccaagcggcaatggtcttttctaagttggcaccatttacgccaatttttttagctaaatcagccaaatcagtaccatgttctactaaaccaatctggtcataaaactcaactgcagcaaaatgagcccgtacacctgagtcaaaaatcaagtatgccccatcttcatgcaaattagtaattgcactagaaacaatctttcgtgtacttaattcattaacaaaacgttgaccattcttgttaactaagatagcaccttcaccgcgcagaccttcaccaattaaataaacatgcggattatcagtatctgcagttgggtgaacctgaatgaagttcatttgcattagttgagcatcaagtgcttcagcaagcttcagtccatcgcctgtagcccctggctgattagtagtcttatagtcaactaagtctggacgatacttcttaatgatatccttggaagcaccaaagccaccagtagctaaaagaaccaccttagctttaactgttttaatgccatctggtgtctcaacttcaacaccattaacgcgcttcttagcatcttgcaacaacttggtaactttagcaccagtaaagatgtcaatacccgcttttttcacctgtgttgtcattcgtgaagttagataaaatccaactggttccattgaagcaggacggtgagcacgtttcttactcatccctcctgtaatggtcaaatcagttaaacgaataccatatttcatcaaccatgaaatagctaaagcagagtggttaacaaagtacttcaacatggcacggtcatttaataaacctccaccttttaaagtttcttcatagaagtcacggttattatcaatgatcccttcgtcaagctgaaccaaagattcagaagcgttcattccacttgaagcacgactagtgttaccaccagttttctcatttttttcaagcacaacaacatttagacctagttcatgagcttgaagtgcagcagtcagacctgctccgcctgagccaacaacgatagcatcatatttattctttaattcttttgtatttggcatttcttactttccctattcttctggagtagacttatcaacattagtcatttgcatatagtccatccattcatcatattgttcttcagtaactttaccactcttcaaagcagcttctcttaaagtagtgccttctttatcagcagtttgcgcaatcttagcagcagcatgatagccaatatgtggcgacaaggcagtaacggtcattaatgaattctcaagtaattcatccattctttcttcattaaccgttaagccatgaatcattttatcagcaaaaccagtaattgtaccagttaaaatatcacaactatctaagaatgatgcaatgatgactgtcttgaagacgttcatttcaaaattaccttgactagaagcaaaggtaatggtggtgtcattaccaaatactttagcagcagccattgttacagcctctgcctgagttgggttaactttacctggcataatacttgaacctggctcatttgctggaatatttaattcatggtagcccgctctcggacctgaagcaagtaaacgaatatcttgcgcaatcttaaacatatcagcagccaatgttttaagggcaccatgaactacatcaagacctgaatggtgagctaagccccagaatttattagttttaacttcaaatttatgaccatagacttctgataatttaccagcaattttttcggtcattcccggtgctgcattcaagccagtccctacagcagtcccaccaatagctaattcgtagagagttggcttcaattcacgaatatatgataagtcatgtttaagagcagaaatatagccagataattcttgaccaaaagtcaaaggcgttgcgtcttgtaagtgggttcgaccaactttaacagtcttccaatatttcttttctttaacaactaattcatcaattaagtgttgaattgctggttccaacttgtccaatgcttcaacggcaacaatattcattgcagttggataagtatcattagatgattgaccacggttaacatcatcattaggcaaaatatctaaacctgggtgcaatttattagccaagttagctacaacttcgttaacgttcatgttgctttgagtacctgaaccggtttgcaaaacatgaagtgggaagtccttacgcaagtcagtatcgcttaaagctagcaaatgatcaattgcatcttcaattgcttcgcctttttcttttggttcatcgccaacttcaacgttactttctgcagctgccttctttaagtgtaaaaatgctcgaataatttgcaatggcatcaattcaccacttgggaagttattgcggcttctttcagtttgagggccccataaagcatttttagggatcttaactggaccaatagtgtcactttcaacacggtattcttcttcgctcatattatattcctccttattaagctctataaggtttgcgttaattatcaatcaccatttataatacctgtaaaggctttctttttcaatttcattccaaaaaaagacccaggatttttcctggatcatagttttatctagactggtgattcattcttttagcaaagaagtcaccaatgatttgaacgataaaaatcaaaataattactaatacagtagctactaaagtaacatcattattgaatcggttataaccgtatgaaatagcggtattacctaaaccaccggcacctacagcaccagccattgcagtcaaaccaatcaaagaaataatcgtcaccgtcgaaacacgaatcagttctgagcgagattctcttaaataaacatcaaagacaatatcacgcgcagttgagcccaaactttctgcggcttcaaccttacctgggtcaacactttctaaagcaacttgcacctgacgagcataaaatggaaatacgcctaaagttaatggtactaaggctgccttcattccgatctgtgtacctacaattttttgagtaactggtgcaacaaaggcaagcaggataatgaacggaatcgctctgaagattgaaactagcttatctgagaaattgtaccagaatttattgggccgaatcccgccatccttagttaaaactaaaatcacgccaaagataataccaagaatgccaccaaagatagctgaccaaaaagtcataaataaggtctgaaaaatactagtgccccagccagcgtctccgccccagccaagttgaacaacattgggtaaatatttacttaagaaactaatcatgatatacattccccttttcatctaaacgtgtaaatgtcacattttgcttagccaaaaattcttgtgtttgcttttgcttagctggatcgcctttcaccaataccaccaaagtaccaattggctcttcattcaaaagttcaacattcccataaagcattgaaacttctacgccaatttgcttatacaattcaataatgattgatttagtcacattagctacgctgtaaactaattgataaattgcttcatttttgccaagcttatcaagcgccaatgaattcaaagtagaaatcgcttcaagtgatccaccaacaaacttcttggttaaatcctgcttaggatgtaagaagacatctcgcaaactgccgtcttcaatcacattgccgtgttccatgacggcgaccttagtggcaatcttcttaacagcatccatttcgtgcgtgattaagatgaccgttaagtggaactttttgttcaaacgcttaagcaggtccaagatttgttgcgtattttgtgggtccaaggcactggttgcttcatcagagatcaaaatatctggattattagccaaagctctagcaatcgctactctttgttgttgcccaccagataattcagctggataaaagtcagccttatcttttaagtcaaccagatcaagcaattccaatgaccgtttttctaattcctcatcactcaacttttcatgttttaaggcaaaggctacattttctaatacagtcgtttcatttaataggttaaaaccctggaagatcattccgatgtttctgcgctttaattgcaattctttattagaaatcacctgcttgccatctttaagaaattcagtgccatcaacggtaatactaccggcagttggtttttgtaaaagattgaccgttctaactaaagttgacttgccggcaccagagaagcctacaattccataaatgtcgcctttttcaatggaaagagaaacattattcactgctttaactcgttcgcccttcttctgagggaaggccacttctacatttttcaattcaacaatactcatttttgatcctccttacttcaacttaacgtcccaggctgcaatttgcgtattgccatagtattccttagttagcttcttagtttctgcagtttggtaagccttgacgacatcttggtaaagcttgtccttttgtttgccttgtttgacacaaagaatgttaatccattgttttgaatctttgttaattggttcaatgtaaatcgtttgcttatcagtcaagccagcaggaccagcataatcattatttactacagaagcgtcaactgaattcaatactcgaccagtttgttcagcaccgatttccttaatcttgtagttatttggattgctggtgatatcagctacagtaactaaggtcttacccttcttcaacttaattaagccggcatttttcaaaacaaacagtgctcttgattcgttagtagcatcgttaggcactgcaatcgtggcaccatcaggtaagtcactcaatttatgatacttgcgtgaataaagtctgatcggtgcgatgtaggttctaccaatggcgacaacgccaccgtgatttgccttattccaatcctttaagaaggcatagtgttgaaaagcattcatgtcaatatcgcccgacttcaaggccttgttaggttggttgtaatccgtaaagttcttagtttttaaggtaataccatatttttccttagccgttttagcaattgacttccaaattgcggcttcggctttactttccccaacgattccgactgtaacagtttttgtctgattttgactgggaattcctggaccaaaactaaaccaacctgcaatcacgatcagtatcccaatgatcgtccaaataatggtatttcttcttctccgttttctcataaaatacactcctactttgataaaaataaaaaagcacccatccccaaaggacgagtgctcgcgttaccacctttaattcgctgatcacttacgtaatcaacctcactggctatcaaaaaatagcctgcactgttaacggatgcagccccgccgatagctaaatatcaccaccggtcatcgttccaaacccatattcactagctcctatttgccaactttcaccaccacgctggctctctttatcaatagaagttctagttactcagtccttcaagatgttgttttcttgatttgttataaataagttatcatcttcttttaatctagtcaacatcttttttaatttttattagataaaagcgatttcattgtataattaggatatagttaaataatttatttttgctaaggagaaaaaatgaagaaaaatcgctttcgaagttttgctctctcattagctgcagcaattggattcatttcttttgctaatactaatgtcccatgcaacaatcaaaccgtctatgctgtttcagataaagcattagtcaatttgaaataccacaacaaacaaattgtgaccgttgatcatgatcagccgcagttttctaagagtacattgagcaagaaaaaaggtccatggcaaaaatatagccaattagattatttgaaccgagctcatgctgctaatgctttactaaataaaagattaatgccacatagtcagcgtgcggctttaacttggaatccgaccggctggcataataaacgaatcgctagtggttggttgtataatcggtgccatctaatcggctatcagttgactggtcaaaacaacaatccacgcaatttgattaccggtacgcgtgaattaaatgatccggatatgcttaaatatgaaaatgaggttgctgaatatttacgtagttcgagcaaaaactatgtccgctatcgggttactccaatatttaaagggaatgacctattagctaacggcgttgaaatggaagccgaagcaactagcaaaaacgggcttcgctttaatgtctacatttttaatgagcaacctggtatgttgcttaattacaagaccggtacttctaaggttaaacatgggtctagtactattgctgaacatgtaaaatctagaaaacgatccacttctcgagtaaccaagaaacgaaccattcaccatatcaaaggtactgtatccactgcagaacaccgagtcgttggcaatcgtcgcagtaagatctaccatgtaatgaacgggcaaaattatcatatgtcatcagctaatgcagtttacttcaacagtgaagctgccgcacaagctgctggatatcgaaaatcattaaggtagtaaaaaagtcagagcaaaactctggctttttcattatcttcttatttcacattatttttgccacgatcatatgcttccttgaattccacaaaagtcatgttctttcctttttgatcaaagacaaccaacacttcggcgattccatccaaaattttagataaccatctaaagatagtcactgccgcacagaataagaccgccaaaataaataatgatttgttattaagcattgtcaatgagaacaatcttggaaaaaagatagttgagccaataatacagataactgataagcccataacagcaagtctaaatttgtttattggtgccgaaatatgatacatcaccataaaaccaactaagactagcaacatagtcgctgtcgtgcctacctgaccatgatcaagtgagatagaggcccctgcaatgactaaaattgcaactgccagccaatctgttaagccccctggaattgcccgagctaaaacatttggcataaactttccacgaattcgcttgtggttgctttctaaggccaataaaaacgacggcaagccaattgtaaatgcagagatcaatgtgatctgggctggctgcagcggataattgattgtcataatcaaagagaagatggccatcaagaatgaaaaaatatttttcaccaagaacaagctggctgaacgttgaatgttattaactacttgcctgccttggttcaccactaacggcattttagcaaaattagaatcgagcaaaaccacttgtgaagcttgcactgcagcactattaccagaagccatagcgattgagcaatccgcctttttcatcgctaaaatatcgttaactccgtcaccagtcatggctacggtattaccttgattttgcaaagcaacgacaaactttcgcttttgatcaggcttaacccggccaaagacattatagttttgcacggcctgctcatattcaccatctttaatggtttgcgcatcgatatacttatctgccccattaattccagcttgcttagctactcgagcaacggttaccggattatccccagaaataaccttgatatcaacaccttgctggttaaaatattgaaaagttgacttggcttctttacgaattggattcgacaataaaatataaccgagaacttgtacattttcctttaaggcggaattatcttcagttaatacgccaggataattagccgcaatcaacacccggtagccttctgccgcatatttttcaaattcagtttgatattgcgcaaattgatcacgcaaaaccatttcaggcgcaccaattaaagttgtctgattgccaaaaattacaccagaatatttattgactgaggtaaaaggcaaaatgctatccgccgttttggttccatctttaaaataggcttgaatcgccttcatcgtcgcattatcagctggcatgtttttagcaaaatccgcaatgatgctacttaaatcaccagtaaaattcttgctactaacagctttttctacggccatcttcggttcggtaattgttcccgttttatctacacaaaggacatttactcgggctaaagtttcaacactcttcatatcgtgcagcattacttcttgtcgcgctaatcgcatagcagctagagctaaggcaatcgtagtcaataaatatagcccttctggaatcatcccaattaaagcagcttccatggaagtgatactacgcttgagtccaatattattcaaaaagaaactctgactaaatagggcaattcccaccggaataatgatgatgccgacccatttaaccagacgattgattgaacgcaccatttcagattgttcaacactgcccattgcctttgcttcgatcgttaatttagaaatatatgagtctttacccactttttctaagacggcataagccttaccggaaactacaaaagaacctgacattaattctgcgtctttagtcttagtgatttcatcagattcacctgtcaacaaggcttcattaacccgcagctcacctgagattacccgcgcatcagctggaatctggtcaccagtttgtaaaagaacgacatcatcttgaaccaatttttcgatgggaattttttcttcttgcccatcacgtaccgcgataatttccgtcgcattcatcacgtttaacttgcttaaaacttttttagcacgaagctcctgcacaataccgataatcgtgtttaaaacaatcactggtaaaaaagtcagatcgttccaggcaccaacaaacaccaatagcacagccaaaatagcaaaaatcaagttaaaataagtaaagacattttctcgaattatttgagtagctgttttggactggtcatcaatggcttgattaacctgtccattttgaattcttggatcaacttcagcttgagttaatcccgttatttgtttatctgtcataattttctgtcctatactgaaaatactttcatccattatagcgaaaaataaaaaagccacgcaactctgcgagactttttaacaattatttattttttctatgataagttaaaaaagtatagtcatacttgttcttttcatcatgatgatgctcttcgcgactaactaattcaaaatcatcatagttaatcgctggcatcactgtatcagttttaaaattagctttgatctctgttttttctaaaagatcaacttgatcaagtaacgccctaaagattgaaactccaccaattgcacagatttcttcagtctgatgttgacgaagatattcatttaattcagctaatgtggacacaatcttcacttgctcattacccgcatatttttgctttaattcttgacgatgagttaaaacaatatgttttctctctggtaacaagtgaggcaaactcgcaaaggtttttcgccccatgatgatcggatgacctatggtcttttccttaaaatgcttcaagtcagccggcagatgccaaggcaaatggccatcgatgccaataccatgctgctgatcttcagcccaaacaaaacttaacattgagacctcctaaactgcaaccggtgccttgatcgtgccatggtgctgataattcagcactttgatatctttcatttcaaagtcttcaatgtgctttttttcaggattaagccacaattcaggtgaatcatatggcgtccgactcagcaattcctttacttggctaaagtggttgcgataaatatgtgcatcccctaaagtatgtacaaattcacccacttttaagccggtttcacgcgcaatcatgttcaagagcagcgaatatgaagcaatattaaatggcacgcctaaaaacatatcaccacttctttgataaagctgcacgctaattttgccatcgactacataaaattggaacatgacatggcatggtggcaaagcactagttggcacatcttccggattccaggccgtgacaatcattctacgagaatctggcgtttccttaatttgcttaatcacgtcagcaatttgatcgataaaaccgcctgtccgcttttcccaatgacgccattgtgccccatagacatcacctaagttgccatatttctgggcaaaagcaggatcatcaagaatgcgctgatcaaatttcttcatttctgcttgataaacttgattaaattctggatcactttgactacgcaaaccaaaattagtcatgtcaggaccctgatattcaggactttgaacccaatttttgaaggcccattcatcccaaatatgattgttatgctctagcaaaaagcgaatattggtatcgccacgcaagaaccacaacaattcacttttaatcaaaccaaatggcacctttttagtcgttaaaagtggaaagccctgtgtcaaatcaaaacgcatttgggcaccaaaatatgatctagttccagtaccagttcgatcatccttgtcatgtccttcagtcataattttttctaacaaatccaaatatggttgttcaagaattgccattatcttcacctttcaaaaaacatttcttctaacataccatagatcttgtatgttggataatgaaaaaccatagatttagtgtttttagataaaaataaaaaggtgaataatcaccttaattacttttcttaaattcatttttgtgtctaactaagtagacgattgttgccacaatcaagactaatgcccctgcgataactgaaattctcgtatcaggattgagaaacatgaaaattacaatcattatcaacattgcaaaggcaaagtaatttgaaaatggatataacggcaatttaaatggatgatcttgtatcgcttctttgttatgccgtctaaatcttaattcagctaataaaatcacaaaccaaggaatcattcctggtaaaacagatgaactgaagacaattacaaataaatcactagctgaatgattaaattgtgaagcaattacgttcaagacaaaaccaataaaaataccagcagaaatccccataattgcacgatcaggtacaattcgcttagaaatatgcttaaaaattcccggtgcttcgtggtcatgagatagcttaaacaacattctgctggaagaataaatccctgagttagcaccagaaagagcagccgttaaaacaacgaagttaattattgaagcagccgcagtaatccctactttagcgaaagtcgttacaaatggtgaacctaggctgtctaatttatcccaaggataaatcgttacaatgacaaaaattgctccgacatagaaaattagaattctaaacaaaactgacttaacacttttaacgattgcctcttgtggattggctacttctccagcagaaatacctaataactcgattccttcatatgaaccaacaatgattgacattgaaaagaaaaatccttttattccaccagtaaagaaaccaccgtgagaccataaattgctaaagccagttgggtggccgccattacctacaccaaagaaaataacgataaagcctaaaataatcattaaaataatcgttattactttgatcatggcaaaccaaaattctagtgatgcataagccttagcactagctaaattggctagtagtaaaaaggcaataatgatgatccccgaccacagcgccgaaatattcggccaccaatacttcagatattcagttgccgcgactacttcggacattcctactacaatatattcaaagacattggcccacatcgctaaatagccggctaagggatgcacatattctgttgcataatcagcaaatgaacctgtccctggattgatataaagcatctcacctaatgcccgcattacaatatataaaatcaaccccacaaacatgtaggctaataatactgacggaccggtccatttaatagtcgaggttgaccccataaacaaaccaacaccgatagcaccgccaagagagatcatctccatttggcctgctgtcattgttcgtttgagttgaggagctttagattttttattcaattttcacaactccaataattaatctatcctaattaataacccgcaattaatttactggttaaatcaacattttgtcaaggttcaaattaaaaatattaatatttgggagtcttttctctaattgattttttattcttttattaaatgaatttcgcgatcaaacatttcctgcatctgtttattaaaattgtgagcaataaagacaattgtggtcttgctttttaataatttttgtaaaatatccatagtcgctgtctgatcaattgcactagttccttcatcaatcaaaataatgtcactatcatggatcttcgatcttgccaatacgatcttttgtcgttgtcctccggaaatattcaaattatccaagtcaattttttcatcgacacctgctttaaactttttaatatcggccgcaaaattaacttcatcaagcacttgagctacttgattattaagttgcttgttgaacattgtaatgttttctttaattgtacccggaaataggttcggctcttgtggaatatagcctattcttgacatattaggcttaattgtcaaaccttgactattttgaaattcaattttgcctgtgctaggtttaagttcacccaaaatcaatttaaataaagtagacttacctgcgcctgaatctcctgttaataagattttctcgccaggtttaactgcaatatcaggaaaagtaagcttttcaccattaggatactgcaaagccaaatcttttgttgaaaatgctactggtgtctcttcttggccagctttaactttttcaatcacagtagcatcaccatcaacttgtttcattaaatcctgtgacgatttcataaaacttaatgcctgaattgtttgttgtaagccgatcgaaatattagctgcaaagttttggacagacataattgcaccaaaaatcactaaattcttagtgatcaaaaaagccgtcaaagacaacaggattatttgtcctaccatgttacagatcccattcaaaataattaattgctgttgagcagccgtttgtttaacatgagcctgttctactttacttgaagttttttcacctacctgaaataacttagcaccagcaaaatatcttcttaattcttctaagccagagaaccatttagctaaaacatctagataatgcttattttgctcagaaacattattagttgcttgttccattttcttttgtactaatttaggtacaaagtaagaaacaatatcaatcactacactagtcaaaaagattgaccaattaattgtaagtagagccaccaatgccgcaacaaacattgagccatagaacggcacaattggataccaatcaaaataattttttctaatcatttctaaatcattagtcatccgattttgcacggccggtacttgatgattttgaccatctctaaagtaatgtgtagccaaacgagcgcgcacctttttattatattcttcttcctgcactcgaattacaaattggatataatagatcatcccttgagcagctaaatataaaatccccattaaagccgtcgcaagtaaaatcttcacccaagcacgatctttgatataagtcagccagtacatttgaatgtagcctgcaccaatagcgaaactgtcaaatcttttgtgtaaatagttctttctcgcaaattgattttttaattatttatttaatcaaagtaggattctaaggtgtcctgaacctgaccaaagcctttatgaattcgattgaaataacggtcattgtagctcattgcctgaatgccaataaaagcatcaagcgactgttcagttggaaactctgccttaggcttagctttgcgcttgatcacattgttaaatgattcaatcatgttagtcgaataaattgaagctctgatctgcttgggatagttataaaagaccagcagatctggttctatgtctttcaagcttctgataacatggctgtaaaccttgccccatttggtatagaagtcatgcaggacagctgtggcttcttctttgtttgtctgttgatgcacctgtttgaattcgttcatgatcttttcacgatcgtcgacgcgtactttagcgcagatattgcgcatgacatgaaccaggcagcgttgaaaatgagctttaggataagtcctggccaaggctgttttcatgccaacaacaccatcagaaagaaaaagctcaacttgctttaagcctcgggatttcatgttttgaagcatatctgtccagacttcaatgttctcgctaggtgcaatgcagtagtcaatgacctccttgtgcccattaggcttgatgccaatggcaatatagactgcttcacgctcaaatgtttctcggcgcaaaggaaggtatgtcgcatccaaatagacgcagaaaaacttgtcgcttagcttgcgtttgtggtaagcctcaacctttggaatcatctgcttggaaatatttgatacctgagctggactgtaatggctgccatacatcttttcaattagatcggctatttccctggtggtcacgcccttggagtaaagcttgataatcatgctttccaagatatccgagtgctgcttgtagtcaggcagcgtgtgctgatgaaattgaccgttgcgatcccgaggcacttgcacttcaattggtccaaactgggtatcaaccttgcggaaataagcaccatttctagaattgccagtattccagccatttctggcatagggatcatagcctagaaaggcagtcaactcagcttctagcaagttattaacagcctgttgtagctctttgcgcaataaatcatttattttgtctggattgaatagagcttgagcaaaatctttggtaaaatcattcatgaaggagttcttctttctgtatgtgtttttttgttcaaaccaatcatacgagaaaggaactcctttttctaatgttttaagaaataaatttaaggaattattcatccttacacaaactattttacagtctcccaatagcagcgacacctgaaataactgataaaatattaatgtaaataaatcttaaataattagttttaataaagcctttgaaactcattcggcgtcacctcgattagtcaatttaatttgccgatcaaacattgaaactaattctgtagaataattgtgcgcaatcataattacagtacttggagtattcaataaattttgtaatacttgcttcgtcccagcactgtcaattgcactagtcccttcatcgatcaatagccaaggtgattgatgaatcaaagctctggctaacacaagcttctgcctttgtcctccagataaatttcctttatccaaatcaatttgactattaagtccagcagacatcttatccaaatccttggtaaaacctacttgatctaatacacctgaaatttgattatttaaagcactattaaacatcgtgacattattggcaattgtgtcaggaaacaaggtattatcttgagcaatatagcctaattcatcaagatcaaaatttaatttttgaccattatgatcaaaaaaattgatctcaccttggctgggcgttaatttacctaaaattaatttaaataaagttgacttgccagttccactatcaccagtaagcaagattttttcaccttgcttaactgtaaaatctgggtaagataaatactcaccatttttgaattgtaaggccagatcttttacttctagcctgttaatcttcttaacttgatgctgatctggagctatttttactggagcttgaagattagtaatttccttattcaaatccttggtggatttaattaaattccattccgttacaaatgctgaaacaccattcattacagttgaactaaattgaatagtagtaattaccgcaccaaaaacaatttgtccttgcaaatataagtaagcacataaaaccatcaagagcatttgtcccacaatattaactacaaaggtgatcatatctgcaatagcaatagttgctccttgatgaatagctgcttttttatattcgtctgcgctttggttaactgattcactaaatatattaaaactggcatatcttcgtaattcatccaggctactcatccacttggctaaagtgtttaagaacttttcatttttcttagtaacctttattgtggccgatgaagtcattttttcaaaagttttaggcaaaaataatgaaattgcagttaaaatcaccgtcattactactaaaagccagttaaatgaaaacaaaattccaattgagaaaagcacagacaacaagtacataaaaccgtttttgattggttttaaataattctgtgttagctgatcaagattggcaaccaattcattttgcactttagcagtttgggcaatttcatttttaaaaaagtagcgactaatttttacacgaatttggtgcaaataagattgtgattgctttccgtataagtaatctgaactagtaatcaaggctaatctaactagatcacagccaatagccaaacaaataaaaataataaagccaaataaattcattttctttagctggttaaaggccggggtcatcaaatattgcgaagcagcatcaacggttgtaccaatgataaccattagaaaaattaaaatgaatttagctttattgaccttaaaaatccctgtaatactcatttgtctcatctccaagcaaattaaaatattaaaaatatcttatttatgtttaatattactgctatttttttaatattcaattactttttactaagtggttaaaaaaataacttgaacggcaaaattattactatatctagctaattcattaggaaaaattggtaaaaaaatagactagaaactcattatcaagcttctagcccattagtttaattcaattattaacggtaattcttcaagaaatctatcatcttttgataagctgcatcatgatctgcatcatatgcatcgactacatcgactactttattatccttagtaataatacggtactcacgtaagtctttcttttcattagcaacaactgtaatctcacccttacctggggtagagaacaattctggattaagttcttcgttcaacttatctgataattgttggttaaatgcgattgtattcatttttgtttttatctcttttctaaaaaatccaacacagacattatatcattattagataacgttgatgaatttagttttattttttatcaaggagaactgtacctgcagaaggattatgatcaattgcaccaatgatggagcagtaacaccttcaatatagcacagcaatacttattcaaaaaatatcaatttgttattttgcattattacttttacatatagatttcacttaattaaatgcacaacaaacatggcaattcctaagaatacaaaaattaaggcaacaatcatactagttactgtgctggtaactaaaactaaaatgatcatgccaataattgaataaatatccatttgttatccctttaattaaacaataacagcagtatttacttttattatgtagcatgaacactttaaaatacaattttaacgtattttaatttgctaactttcgatataacggcaatagctgcccaataccatctaagatgaagttttccatatctgcaacttgatcttgctttctaaaagcaaattttcctaataggaaactggattgagttgcttccttattaaatgaagtctgtttttcagcatctgttaaatactcatttaaggataaatgatcagcaaactccatttcgtttttatcccataagtaccaattattagttgtccgcccttttgcccaatcaggaagatcagttaataatttattgtattgttcaggattatcgccgcgcttttcactcttataatgctgaaacataagataaacctgcagctgcttattatccagcatcacgccgatgcatggacttttatcggctaaagcattcaaacgataagctgcccagtaatgatcgcgtaagttccaaccattggtccaactttcaacatgaactttagcaaatttatcttgtggtaatttttgataaacatttaagtttatttctttccaggtctgccaaatttctttaaaatctgtttttatttgcgctaattcatcttcagaatattgcgatttcaattttttaaaagaaaattcatcccgatcaaaaattgcatacatttcttcagttaattgcgtcattttacaaagtccttaccatatttacgctagtaacaccagttggatctggaatatcatcattggtctcgccttcattataaaaaccacgtttttcataaaatttaatcaatttcggtaaacaagttaaagatatagcttgacgattttgctttctgccctcttgcgctattgcttcaattaattttgtcgctacgccttgtttgcggtattcaggcaagaccgctaaactcaagaccatttgatagcgatcatctttttgattaggatgattttcaaaatataattcatcttcaatatagcgtttattaaaagcaggaccaaaaatatgaccaatcacttttccatcttcttgtgcaactaaaaaagtatcaggataattctcaattctaccaatcatatcttgttcagtttgctttttagtcatcttaaatgcgtcagattccagttctactacttcatttaaatcatccattgttacggtgcgaatgatcataataagcatcctccttaggtttatctctaaaagtgaaaaagggttcaaaagtcatttagactcttgaaccctatattattactctctatttaattcttccactttaatttaagacgatcttgctcagtctttttttgaaaatacgtcttcaccttcggcactacttcttcgccataaattctaatggcattcatcacatcttcatgcggcattgaggcaattggcaaatgaagatagaagcgagttaacccaagttcttccatgactttgatgatcttatttgcaactgtctcgctatcgccaacaaaaatagctccattttctccaactgcctcaagatattgttcatatgtcatccctgtccattgcggtctttccgtactaatttgatcaactaacaatttcgtaggatagaagtaatccttaattgctttgtctttatcatgatttaaccagccccaagagtgtgcagcaattggcatcttcgttaaatcattgccaactttttctgcaactcttctgtacaacttaattagtggtttaaagtgcaaaggattaccgccaattatcgcataaacgattggcaaacctaactctgcagttcggatagtcgattctatgcttccacctgtagctacagaaatagggattggctttttagtgcgcggataaattcctttatgatcaactctaggtgtaaactttccttttggccaatcgagaatttcttctttgttcattttgagtagcatttctagtttttcaataaaaagttcatcgtaattttctaaatcataaccgaatagatcaaatgcctcagtaaatgatccacgtcctgccatgatttcaactcttcctgatgcgattgcatccattgttgcatattgttcataaactctaattggattaattgttggtagatttgtagtagcacttgaaagatggatttgcttagttttcgaagcagcagctgctaaaatgatttccggtgctgagacagcaaaatctttgcgatggtgttcaccgattgcaaatgcatcaatattcaatttgtctgcaagaatgatttcttctaataagtctctgattctttgatcatgactaattgcttttcctgttgtttctaatggtgtagtttcaccaaatgatgagatacctaattcaatattcattttatcaactcctaaattatttcacttactttttgtaagtaaaataatagcagataatttttgaaaaagcaatatcttgaatatgtgatcctttacttagttgcagttcttctaccaacatatttgataaataaagccatgattaaaataactaaacataaaagaaaaatatatgcatgctgtgttccgattctggttaaatcagctgacttagtacctttttgactagaagcaacgattgctgaagtaattgaagttccgacagcaccggcaaattgttgagcagtatttagaatagcgttgccttgagtagtttcactctcatcaatcactgccaaagtatcagtcataacatctcccaatatcattcccattactgccatgtaaatgatataaactatcaatataaaaatattattcatctgattaggtaatactgcaaaaaacgagactgtaaaatagtttgtgtaaggatgaatgattccttaaatttatttctttaaacattagaaaaaggagttcctttctcgtatgattggtttgaacaaaaaaacacatacagaaagaagaactccttcatgaatgattttaccaaagattttgctcaagctctattcaatccagacaaaataaatgatttattgcgcaaagagctacaacaggctgttaataacttgttagaagctgaattgactgcctttctgggctatgatccctatgccagaaatggctggaatactggcaactctagaaatggtgcttatttccgcaaagttgatacgcaatttggcccaattgaagtgcaagtgccccgggatcgcaacggtcaatttcatcagcacacgctgcctgactacaagcagcactcggatatcttggaaagcatgattatcaagctttactccaagggcgtgaccaccagggaaatagccgatctaattgaaaagatgtatggcagccattacagtccagctcaggtatcaaatatttccaagcagatgattccaaaggttgaggcttaccacaaacgcaagctaagcgacaagtttttctgcgtctatttggatgcgacataccttcctttgcgccgagaaacgtttgagcgtgaagcagtctatattgccattggcattaaacctaatggacataaggaagtcattgactactgcattgctcctagtgagaacattgaagtctggacagagatgcttcaaaacatgaagtccagaggcttgaagcaagttgaactctttctttctgatggtgttgttggcatgaaaacagccttggccaggacttatcctaaagctcattttcaacgctgtttggttcatgtcatgcgcaatatctgcgctaaagtacgcgtcgacgatcgtgaaaagatcatgaacgaattcaaacaggtgcatcaacagacaaacaaagaagaagccacagctgtcctgcatgacttctataccaaatggggcaaggtttacagccatgttatcagaagcttgaaagacatagaaccagatctgctggtcttttataactatcccaagcagatcagagcttcaatttattcgactaacatgattgaatcatttaacaatgtgatcaagcgcaaagctaagcctaaggcagagtttccaactgaacagtcgcttgatgcttttattggcattcaggcaatgagctacaatgaccgttatttcaatcgaattcataaaggctttggtcaggttcaggacaccttagaatcctactttgattaaataaataattaaaaaatcaatttacgagaaagaactatttacacaaaagatttgacagtttccaaaaaacaatgtttcaagcaacatcaaacttacaccaaataaaacaggtttgcgtgcaccataattatctagcaaccgaccaccaattggacccatgattgcaccagcaactcctgctggcaaaacaatcaagcctgctaaaaaagcagtattatgattaaccaattgaatgaaatttggcaataaaaatgcattgcccaaagatattagttgaatgcagaaaaaaccaataatatgacctgtaaaactatgatttttaaataattttagatccaaaattggcattttaattcgattagatctccaaattaacagagctaaagctaataaagcaatcaaaatttgaatagcagttgcacccaattgtcctgttcctaagttgctaaagccaaccagcatcccaataaagaagattgcaattatgataaagctaaggcgatcaatcttaacttttttaacagcagatttttgttcaataccccagatgcctaataacaatgaaataataatcaatggaattaaaaaccaaaaaacctagcgccaattcagttcctgtagaacaatcccgccaaaggtcggcccaagtgctggtgctattccagtgatcatactgccgacacccatcatagtaccaactttacccttaggcacttgttctaaaatgatgttaaacattaatggcagggcgattccagtaccaatgccttgaattactcttccgatcaatagcaccggaaaaattggtgcagtagcatcaactattaagccaagtaaaaacaaaaaattagcggttaaaaatagacttttagttttatatgaactttttaatgcagcagagattggcacgataattgaaactgcaagcaaataaattgaagtcatccattgcacaacattggttgaaacattaaaatcacgcatcaaggttggaaaagcaatattcattgaagtttcaactagaacgccagaaaatgacattaatcccgtggcaattactgctgcaaacacttttgatgatattctttcattatttgattccattttttctccatttttgacaaattttaaaacttttagtgccgtatttatttcagcttgtgtaaaatgactacgaacttttcgatcatcttgacgcatataatcttttatcttgggaataagtgatttactcttagcagttaaagaaacatccttctgtcttttatcgaccgcattagtaacgcgtttaactaaatctcttttctccattctttgaatcatgattgtcaccgttgaacgctttaaatctagtttcttttcaatttcatgttgtgaaacagtttgattttgatgattagaaataaaatctaaagttgtcatttgaacgccggtgatacccaaagtgttagcaaacgtctctcgttcacgatctatttgaatggaagattgcttaataaccttttttatcggttccatataggtcctccttttgttagatgtctaacatattttgcatttatatttgttagatatcaaacatattttttactaatttgagactttagttcaaagtaaatactagtaaatatctatttcatcatttgacgtaaaactcacatctaattctttgagactgtaaaatattttgtgtaaggatgaatgattccttaaatttatttctttaaacattagaaaaaggagttcctttctcgtatgattggtttgaacaaaaaaacacatacagaaagaagaactccttcatgaatgattttaccaaagattttgctcaagctctattcaatccagacaaaataaatgatttattgcgcaaagagctacaacaggctgttaataacttgttagaagctgaattgactgcctttctgggctatgatccctatgccagaaatggctggaatactggcaactctagaaatggtgcttatttccgcaaagttgatacgcaatttggcccaattgaagtgcaagtgcctcgggatcgcaacggtcaatttcatcagcacacgctgcctggctacaagcagcactcggatatcttggaaagcatgattatcaagctttactccaagggcgtgaccaccagggaaatagccgatctaattgaaaagatgtatggcagccattacagtccagcccaggtatcaaatatttccaagcagatgattccaaaggttgaggcttaccacaaacgcaagctaagcgacaagtttttctgcgtctatttggatgcgacataccttcctttgcgccgagaaacatttgagcgtgaagcagtctatattgccattggcatcaagcctaatgggcacaaggaggtcattgactactgcattgcgcctagcgagaacattgaagtctggacagatatgcttcaaaacatgaaatcccgaggcttaaagcaagttgagctttttctttctgatggtgttgttggcatgaaaacagccttggccaggacttatcctaaagctcattttcaacgctgtttggttcatgtcatgcgcaatatctgcgctaaagtacgcgtcgacgatcgtgaaaagatcatgaacgaattcaaacaggtgcatcaacagacaaacaaagaagaagccacagctgtcctgcatgacttctataccaaatggggcaaggtttacagccatgttatcagaagcttgaaagacatagaaccagatctgctggtcttttataactatcccaagcagatcagagcttcaatttattcgactaacatgattgaatcatttaacaatgtgatcaagcgcaaagctaagcctaaggcagagtttccaactgaacagtcgcttgatgcttttattggcattcaggcaatgagctacaatgaccgttatttcaatcgaattcataaaggctttggtcaggttcaggacaccttagaatcctactttgattaaataaataattaaaaaatcaatttacgagaaagaactatttacacaaaagatttgacagtttcaattctttactaagaaaaggattttagttacatttgttgctaaaatagatttattatttctactcaaaataaggagttaatcataaatgaataaactaaacttcgaactactgcatatttttgatgttgttagtagatttgctagcttcagtcaagctagcaactatctctacctagaccaatctactgtcagtaaaaaaattagacagctagaagctattgtcaataagaaattatttattaggaatactaatggtattgtcctcactgctgctggacttgcttttaaaaataagtcagataaaatacttcaagatttaaaagaaataattgcgctaaagccaactataaccaccttacgagtcggggtatttgataatataagtgcctatctgatgcccgatatttttgctgaaaattttaatctatttaatgagggaaaattagatgcaatagttatcaatagcgacttctttactcaaattcaaggttctgcaattgagacgcaaattactaatgaatcttttgcaattctctttcgcaaaaataatgctctcattgcaagccaaaatagtatttcgttaaatgatttaaaaaataaaaatcgtaaatcaaaataactattataaaaaatatttattggtaatagttgagactgtaaaatagtttgtgtaaggatgaataattccttaaatttatttcttaaaacattagaaaaaggagttcctttctcgtatgattggtttgaacaaaaaaacacatacagaaagaagaactccttcatgaatgattttaccaaaaatatagcacaagctctattcaatcaagacaaaataaacgatttattgcgcaaagagctacaacaggctgttaataacttgctagaagctgaattgactgcctttctgggctatgatccctatgccagaaatggctggaatactggcaattctagaaatggtgcttatttccgcaaggttgatacccagtttggaccaattgaagtgcaagtgcctcgagaccgcaacggtcagtttcatcagcacacgctgcctgactacaagcagcactctgatgttttggaaagcacgattatcaagctctactccaaaggcgtaactaccagagaaatcgctgacttgattgagaaaatgtatggcagtcattatagtccagctcaagtatcaaatatttccaagcagatgctccccaaggttgaggcttatcacaagcgcaagctaagcgacaagtttttctgtgtctatttggatgcgacataccttcctttgcgccgagaaacgtttgagcgtgaagcagtatatattgccattggcattaaacctaatggacataaggaagtcattgattactgcattgctcctagtgagaacattgaagtctggacagagatgcttcaaaacatgaagtccagaggcttgaagcaagttgaactctttctttctgatggtgttgttggcatgaaaacagccttggccaggacttatcctaaagctcattttcaacgctgcctggttcatgtcatgcgcaatatctgtgctaaagtccgggtggatgaccgcgaaaagatcatgaacgaattcaagcagatacatcaacagacaagccaaaaagaagctgcagctgtcttgcatgaattttatgcaaaatggaataaagcttatagccatgttatcaaaggtttgagggaaattgagcccgatctgctggtcttctacaattatcccaaacaaatcagagcttcaatttattcaaccaacatgattgaatcctttaacaacgtcatcaagcgtaaagctaagcctaaggcagaatttccaactgaacagtcgcttgatgtatttattggcatccaggcaatgagctacaatgaccgtcataaaggctttggtcaggttcaggataccttagaatcctattttgattaaataaatgattaaaaaatcaatttacgagaaagaactatttacacaaaagatttgacagtttctaatagttagctatgcataaagcgaatgaataaagattattaattagctattacgtttcttaatttggcgattttgtgttaacttgattgttatccaaataacaacgtatgaaagaataaaaataaacaatgtccaaatattgatagaccaattatttaacaacatcattattgagaataagctaaaagttccaattaacataaaaagtcttcctttccgaattcactatttaaataagtggttaaattcaaaatacaggatgctaaaatttaaaatcctaaaaattaatatctgtaagctaaatatttaagttattgaactgagtttgctatatttaagttaaaagataataaaaggaggaatttcatgaaagttacttttaaaggaaaagaagttgaattaattggcacaccacctaaggttagcgatgaaatgcctaactttacagttttagacaaaaataagcaagaagttactaaagataatttgttaggtaaaaatactttaatcagcgttgtgccagacatcaacacttccgtttgcagtattcaaactaagacttttaacaaaacaatggatcagtttcctgacgttaactttttaactatttcaactaataccatcaaagaccaacaaaattggtgtgcggctgaaggtgttaaaaatatgcaattaatgtctgatgaaaaattatcttttggtaaagctactggcttactaataccagaatctggaatactagcacgcagtgtgtggattcttgagcctaacggtaaaatcgtttatcgtgaaattgttgatgaaattactcatgagcccgattataatactgctgtaaatgaattaaaaaagttgctgtaaaatttaaaaaagattgcctcagtacatacacatatgctaaggtaatcttttttttctacccaaagtcaagtattatcaatgatttaagaaaataaatttacttgttttaatgatgcgaataaggttaaagcaaataagagtttaaatttaagaaaaagcgaaagtaccacaaataagcctatgaatacttgtagtttttccataggttgcttatacttaagttgattatttgatttcagctaaagtcttttattttcggtggctatgttgtaatcatataattgatcatgtttgataagagcaaacattgtgcgtatcagtttatggactgatgcaatggcgattttcttatagccttggctatttgaagatcgttttttcttgtcataataatcagttatatggcaaggctgcgtagcctttaccgtctccatttgaataataactcgataaagtatttttctggcaatatgattgccatgcttggtaatgccaagagaactgtctttttcaccagattggtaccttcctggatcaatgccaacaaacgcatcaatttgagctgaagtgctaaaccgtcttagatcaccgagctctgctactaatctcactgctgtaattctagcaacccctgggatactcaaatagatggataaagcacgagcgtttactgctttagccagcttttccatgtagttaattacatagtcgcgttcttgctggagtgaaaacaaattagaaatgttcctttgaatagctctaacgataatactatctttggaatcataaggataagcttctctagcaaaagcgtataatcttgtggttaagtaccgtgccctttgttgtcctattccagaaatagaattaagcatttgagttacctgtgtctcattcttttctagaacatatccagcatgtgggaaaagactaacaagcgcccaataaattctgccagatggatgagacagtatttcttcaatttgtgggaaagtggattggaggttgcggtgcaattgatttttagtagtaactatactcctagtaagttcttcataatagcgactggcattctgaagttcatgatactctctgggctgtggatcacgcaacttttgcggggcattaaattgaattaaagccaggcgataagcatctaccttatcagttttattatggcgtaaattattgtccattagctttttcgctttaagcggattaagcttcaaatacttaatatgataatcctctaagaaagcttgcaggcttagagaataaacaccagtagcttcgaaaacaactaaaggagttatcaaatattggttcagttgctcataaagtttttgatagccaaaggaatcattagagattctaaaagattcgccttgtttgatccggtcattaaccacacaaactgtggaagatttactgctaacatcaataccgaaaataatttgtgattccataatataacctccgctgtgaagataaacctctttatcaacctattaattctaattttctaaacacggcatctaagtgcccacagacttcgaagagacttaagaataggtggtaaagcagtccgtttcttttacgacatcaagtgtctaaaaagctgaagacttgatttgctttatcttcactttctattttagacaaaataaaaagtgccagatcgtgaatccgtcgattcatgatccaacactaggttagtatgtttctttagttcttatattgttccattctttgattaagttcttccttattaaaattatctaaattaattgcttttccacccattaaccaatcaatcatttcaggatctactttatctttaggcgtatcgtaataatcttgcaaagaccatacaccaccaatgtcatcaattattccataaccttttccagaaagtatctttggacacttaggagctgcttgatcagtagtgatgttcttaatatctacttcgaattcccagctatcgccataatcataagttaataataatttatctctcttttcaaaatacgaaaccttagctttttcataatctatgcctgtagccggatcccaatctttcgcttcagcgatactttctgcattttcaaagcgttcctgcgtttttttattcagcaaatcaaacatatgtccaaaatctgcattaaacatatctagcatagcaacttctaatgttttcactgacgtattgccactaataataaatctacgccaagtagatggtttaaaagactttagttttactctaatttcataggtagctcgattgcgagtttgattttcaaaaattgtcttttttcgtgttttctgctttttatcatgactctcaagatcttttcgcaagccttctaaaattctagacaaatcctgagaagacagatctaaatcttcaagttccaaaatctttttcggatttgcttcaattgccgctatcatatcgtttatcaaatcctcatccaggccttgatcggagtatgaattaatttcttcaactacccagtcaatattcatccctatttctttactatcagttttacgaataagacctactctactcaaaaatacatagaaatttttcaaagtatttgtaatctgctctatttctagcggatgtagtttattgttagatatcataatccataaataagaaatcgcttctcctaaatcattagtaactaaatggatcttattacgtaataaataatgatttagataatccggcagcatttgatcaggttggatatatcctattcctgctggtacatatttagcatattgatcaatgagtttttgattattttctttaattttagcaacaatcttttcattgccttttactggtttattttcatatttttcaaaattagagaaatcttcaaattttggcactaagtcaacatacttatatcttcgatttggtttttgcggcttaatagggaaatacgtactaacctcatcaatcatcttagaaataaaattttgtccaatctgactatccaaggcaaaaatagtcgctgacattacagttagcttatctacgatattcttttcatcttttacaacatcaatcaaatttaaatattcgctttgattatcctctataagtttacgaattttttctagcattaaactagcttggcttttagtatcgtaaaaagacatttgcttggactttaccgctgaaactaatttttgttgctgtttaaacaaaataaagtcatagcttttaatcgcattagcaaaaacatcattaaacagtttggtatcaagtttagttaataaaattggaaaactagtgtctttttcaactaataaatagtacttttgcttttgaatatttattacatctgcatcccaaacagtaaaaggctcattcttaataatatcaatcttattttctttaatttctggtgctaagttaataccgtatcgtactggaagcatgtggttctccttattaaaataatttcattttaattttatcatacgcgtggtgctagttaaatcgttttagttaataaaaaagtccaatcttgttagactcgacttgtaaatagtaataatagaaaagagtctgatctgattgaactgccttaagcttaagcgttttagccaccatttacaagttagttttaaagatttagtgataatttgtcggcactggtatcgtttgtatgcaccggctgagtttactcatcggcgaaatattgatcaaattaaaactacggacagtctgattttggctttacttatctggcaagctaagacaggaattgaatcacaaagaagattctgtgaatgtttcaattgtttatcacactcacgttttaatcggcgttcacgtcagctattgcaattgatttatcagatacggcaagaaatgaataaaaaggttgacctgaatggacagttcttgatcattgacagctttccggtacctgtttgccaaccaattcgaaactatcgtgctaaaatttttcgcggttatgccaacattggttataaggccaccaagaaaatttacttctatggtttcaaagttcatgccattgttagcgatgacggttacattcttgattatgtcgtaacaaaggcatcagttcatgatgccagggagacagttgaactgatagaaaatacccatccatctaattactatcttcttggcgacgaaggctatttaggcaaagaactgcatcaacagctaaaacaaatgggttacgaactttggacaccatatcgtaaaaatatgacaggagctaaaaagcacaatgatcatcaattgatggctattcgcagaacaattgaaagcgacttttcgcttctgacctattacaatgccgagaacaatcgagcacgtagtctgataggctttcaaagccggttggaaattgcaattttagcttataatttggcttattgtctagaacgatttaactagcaccacgcgtattttatcatgtctattcacaactattcatctcagaagcaaaaaaatgaaggcaatcactgccttcatctaaaatacacaaattttagtcttcttctaaaaccggtactgtctttttatttctaacatgatatacaactaaaccaattgctaaacctaccagtgctggcactaaccatgataagcccatgctggcaagtggcaaatgatttctaagtgaagccactgctaaaccaaatgaactttgactaaccacacttgggaaagcaactaccatatcgcctaaagctggtacaacagtaaataggattacgaaaaagtaaactacacctgccttattaaacaatggtgaacaaactgatagcaagatcaaaaccatggataaaggatataagaacattaacatcggtgttgaccatgaaatgatttgatccaaaccaaagttagcggctaagaatgatgccaagcaactaagtgctaaccaaacgtggtaacttaccttaggaaaatgcttatgaaagtcttgcgcaaaagcagcaaccaaaccaactgcagtagtcaaacaggtaactgtcaataagaatgcaagtaaagcttgaccaaagacaccgccataaacgttaacgatttggttaaaggctaccccaccgttatcagaaactgcaaagcgtccgagagacattgcacccattaagatcaataacaagtagataaaaccgattgctaaaacggccaagacacctgatttagcaacaacttttgaaacacttttagcatctttttgtcccatgccacgaacagctgtaacaactgtaaccccaaaggctaagcctgctaaggcatccattgtgttataaccctctaagaagctatttactaatgctccatgcttataagcagcagttactgcagcagtttgtggattccccaacggacgagcaaaagctacaagaaacactaggaataataatgccaagaataatggatttaataccttaccaacgttagacaagatattattttgatgataagaaaaagcaaaagcagctaaaaagaataaagctgagaaaacaagtaaagcggaactttgcatattcttcggcataaatggtgcaataccaactgtgaaagaaacggttgcagttcttggggtaccaaacaatggtccgattgtggcatggattaaaaccataaatactactgcaaatccggcacccagcggcttaccgatgtcgtatactccgtttgcatgagtaattgctactgctaatacagataataatggcaataaaacccctgtgattaaaaagccaattgcagctgttccccaatttgctccagctagttgtcctaaatgtaatggaaaaattaggttaccagccccaaaaaataatccaaacagcaaggaagcaacaacgagataatttttccatgtaagttttttcgatgtatgatctgtcattttctctcctccaaaacatccctgataaacaaaaaagaccctcagctgcaaattgcaactgagggacgctttgagcgtggtaccaccctttatttatatcactattgctagcaatacctttcacgtacagtcaattacttgacgatacgtaggcactataatgggtgctcccactacttcttactttaagttaagaaatagaactcgaaagtgattttcatttaaacttaggatttatctcctcacacctaacgagactcgctgtaaattaagtctaaattactcttctttctctttgttttcagatttattaaatttgttaataactattttaatcaaaatataatcgttgtcaacaacttttttatttatttttcaaattttctattcaaattgagtctgccaattaggatcattatttgccgcaaaacacatggtaatttgttcctcagtatttcgcccaagtgaaagcttcggtaaattatctaatgcaaaataatcacaagcatcagtttcatcgttcggcttaaattcaccactaatttctttgcataagtaaaataccttcgtaatgttggtggccaaaattggtttattatgatgactacgatcttgaactgcaataattttgacgggtctaactactctacctgcttcttcatatgcctctttaacacaattttgtgctgtagtttggtcataatcattccagccgcctggcaatgaccattcctgagtcattttttcacggacaagcaaaattttattatccttaaaaattgctgctcgcgtatcaatcttaggtgtttgatagccctcatcacccaaaaagagtgttttaatttgttctttaggtagtcctgtcctagctgccatcatttcgcctgcaattttacggattttttcatagcgctcacgatcaaatacatcatgaccataatgcaatcctgcttgagctaaactttgtaaatctgtcgcccacttgataaattgatcatctgaattcatttttattgcctttaatataaaattctaagaaaaataacaaattccaaattaataggcagattgaaatacctattttagattttatcacaacccataagtaacttactcctagtgcaaaaattagtagcaatgttaacagattacgaacttaaacttcccacacgcaaaattgcttgtttcattgtgattctgcgtgttttgacaaatataaaaggcacaagtccttttcattgctataattatattgaccaaaacataatttatttgcatgaaaggcttgtgccaatgtctattttaccatctcctgaccaacaaaatgaacaactattttcaaactcaatcatcagcttcatcaagaagtttcaggtgatcaagctgttgagaaaatgtggcttccgcaaggaaaaaggcattagcctgttcagcttgtttctttacgttttaagcaatgtctttcgtgaccgcagcttatatatgcagctgaaaatggatcattttcaagaaaatttttccaagaactcatattaccgttttatgcgcaacgttcacgtcaattggctccacttcaccacacttctgtctgcgcaaatcattaataaccacttgcgatctttgacttcagaaaaacgggctgattgctttgttgtcgatgattcctacttctctaggaccggcttcaagaaaacagaattagtcgccaaagtttttgaccatgtatcaatgacttacaagaaaggttttcgcatgatgaccctgggctggactgatggagcttctttcatgccaatcaattcagtgctgctgtcttctcagaagctacagaatatgattggcgaaaataaagtttttgatcagcgcaccattgctggccaaagacgtatgcttgcccggactaaaggcacagacgtgatggttaatttaatcgaccaagctatgaaagcaggtcatcaagccaagtacgtgctgtttgacagctggttctcaaatccacatcaaatcgtccagctcaagcaaaggaagctggatgtgattgccatggttaaggttagctccaaaatcaaatatgaatttgagggagaacgcaaaaacatcaaacagatttatcgcagctgtaaaaagcgatgcggccgttctcgctacctgctgtcaatcccagtcaaagtcggacgccaggacaaagacggtgctaaaatagatgcacggattgtctgcgttagaaaccgtgccaatcgcaaggattggctggcaatcatttgtaccgacatgtcgcttagcgaagatgaaattatccgcaactacggcaagcgttgggatattgaggtttttttcaaaacttgcaaaagttatctaaaactaagtacggaatatcatggcctgtcttacgatgctttgaccgctcatgttgccatagtttttactcgctacatgcttatgtcagttgccaagcgggacgatgaagatgaacgcacgctaggcgagctgttctattgcatgattgatgagctggcggacattacttttagccattccttgcaattgattactgatgcaatgctggccagcgtaaagcaagtctttcatgccagtgaagcacaaatagctgaattcacggctgactttatcaatcgtttacccaaatacatgcaaaaattgttaaagaaaactagcaaaaataatatagaagcctaaagccaagcaagatcaagagattactggcttatttagtgtgggaagtttaagttacgaatactaaatcgacattcactcttattatatacttgatttatagctaatgagaaataatataaggccattgaaaaaataatcaggaaaaataaaaaagttttgtttatattctgcacttgtaaatactgtattgctactgttgacaaaagtattgcgactacaattgcaatatgactatacattgaaataaagcctttacttatctggtgatgatcaattaattcatctgataagacaacatagcttgcaaacattaatactaaagataaaaacaaaaaagcagcataaactaacggtgtcttactattgaaataacttgtcaaattaacaatagcctcaccaaaggcaataattacgattaaacttactctctctaccaaatgaggaaaatttactcgttcagctttaaacatcccttttaaaaacaatggcaaaataaaaccaacaatataaccacttatacaaaaataaattccaacagggtagccgatgattaatcctacaataattaagataaattccaatcctaaaataattaaaaaggcttgtttatcattattatctgcttttacaaatagatactgacaaaataaaattaagatcataacagccattgcaatattaaaatagtgaaaagtaattcgccattcagtattaatattgttagccagataaactgctacaaacatatttaaaactaaaccgccaatatctaaaaatctgtttttgctatatcggttaaaatagataacttgataaagccaaatttgcattactacaattacaaccaataaaaattgaaaaaaagtaactaaaggaatactgccattaacaggatgatgaatcatcgcagtaattcgagaaattacatacacaaaaactaaatcatagaataattcaaacattccaacaggcttagcgattatttttttcaaactattccctcctaatatttgattactgtctatcatgctttatatttgtccaaaaagcaaattatgatattaatttggcaatctcagtttttagcttgattgtaaaaaattatgctaaagtaattattgattaataaattaatttaactggaggaatagccatgccacgaaatcccagaagacacaattttaatcagttctcagaccaagaaaaagataaattaaaaaatatcaaaaaagaattagctgaggcccaaaagaaagagcctgaaagtctacgtgaacatctacaagcctttaatgatggagtgatggcgattatcattacaattattgttttagaaattcaacctgctctgcatgaaattcattatcagcaattcattagcaacattgctgtctttttaatcactttttttattgtggcagacttctggtatgatctacatttatctttttcatactatattttcaaaccttcaaaagcgattgccattctagacttcttttttctagctgatttatcacttctgccagtcatgactaaatggattatggctgaaaattcttctttcgctgtagctaactttggaattgtttttttaattgccaaaatcttagaatatctaattcaatattttggtgctaaaaatactgcggaaactgtcaaatcttttgtgtaaatagttctttctcgtaaattgattttttaattatttatttaatcaaagtaggattctaaggtgtcctgaacctgaccaaagcctttatgaattcgattgaaataacggtcattgtagctcattgcctgaatgccaataaaagcatcaagcgactgttcagttggaaactctgccttaggcttagctttgcgcttgatcacattgttaaatgattcaatcatgttagtcgaataaattgaagctctgatctgcttgggatagttataaaagaccagcagatctggttctatgtctttcaagcttctgataacatggctgtaaaccttgccccatttggtatagaagtcatgcaggacagctgtggcttcttctttgtttgtctgttgatgcacctgtttgaattcgttcatgatcttttcacgatcgtcgacgcgtactttagcgcagatattgcgcatgacatgaaccaaacagcgttgaaaatgagctttaggataagtcctggccaaggctgttttcatgccaacaacaccatcagaaagaaaaagctcaacttgctttaagcctcgggatttcatgttttgaagcatatctgtccagacttcaatgttctcgctaggcgcaatgcagtagtcaatgacctccttgtgcccattaggcttgatgccaatggcaatatagactgcttcacgctcaaatgtttctcggcgcaaaggaaggtatgtcgcatccaaatagacgcagaaaaacttgtcgcttagcttgcgtttgtggtaagcctcaacctttggaatcatctgcttggaaatatttgatacctgggctggactgtaatggctgccatacatcttttcaattagatcggctatttccctggtggtcacgcccttggagtaaagcttgataatcatgctttccaagatatccgagtgctgcttgtagccaggcagcgtgtgctgatgaaattgaccgttgcgatcccgaggcacttgcacttcaattgggccaaattgcgtatcaactttgcggaaataagcaccatttctagagttgccagtattccagccatttctggcatagggatcatagcccagaaaggcagtcaattcagcttctaacaagttattaacagcctgttgtagctctttgcgcaataaatcatttattttgtctggattgaatagagcttgagcaaaatctttggtaaaatcattcatgaaggagttcttctttctgtatgtgtttttttgttcaaaccaatcatacgagaaaggaactcctttttctaatgtttaaagaaataaatttaaggaatcattcatccttacacaaactattttacagtctcatactgcgcgctattcccaaatcatgcgaattattattagccgctcctttattagaaaaatgacggttactttatttttaaatgtagtattgatcattctgtcattattcaatgccaaactagcaatgattctttatttaatagttccagttatttcatttctttttccagttaaacgcaacaaaattatgtgatttttatttaaaagagcgccagtaaacttaaactaaatctactggcgctcttttgttacttttcttgttccttgcaaacacattctttactatttaccattttgcagtggcaaatgccatccttatctgcacaaggacaatttttctgacatttcattttatcgtgacaaaattcatttttcatgtttatcacctctatagcttattatgcctatgataatcggactttccaaccaatatatcttacaattttacttttcctaataagattattttatagaaatacctagttaatttgttaatttaatctgctgatcagctaccgatgtaatgaagtaaggatcatgctcaattagtaacatcgttggcttcacactcttaagaagcttaattaattgatcttgattgaatacatctaaataatttgctggctcatcccataaatataaattagcaggttctgtcaatgacttagcccaagctactcgtttctgttgtcccatactcattttttcaattctagttgtaaaatcagcacgcgcaaatcccattttcttaagattgctcaacaaagcttcataagacaaatgatattttttagcaaagtcttttaatgatccgctatacattacaaattcttgtggtaaataagagattttcaaactttcaattagctcataattacctttggcaattagattttgagagatacccagtaaatacttaattaatgttgactttccagaaccatttttaccttcaatagcaataatttcatgattattcaaagacaaagtcaagcttttaaatagttctctactattttttagttgcaagctaagatcattaagttgcaaaatctcacgatgataatctgcctgaaaattcatagtcatagtaggaactttttcaatattctttagcattccttctttttctgcaatcctcttatccatgcgattgcgtgcattaatcgatttcttcatcatctttgcagcttgatgtccgatcgctcccttatttaatctgtttttgtttgtaaccgcttaaattaattattgacatttagctagttcagttttacgataaagttgaattaaataaatgttcttcgaggcaaggtgaaattccttaccggcggtgaagtccgcaacccgcgaaagcggtggaatccgataatcggtaccgatagtatagtctagatgatagaagaataataaccaataagtaacgcttatttgcgtttgccttgattatttgactttgaatattattactgaacctcgagaatactcgaggttcttttttgttctacgaggaagtgattttaatggaaaaagataatttttatatgaatttagctttagaagaagctaaaaaaggtcgctatcaaacatggaaaaatcctatggttggtgccgtaatcgttaaaaacggtcaagttttagctactggctatcatcaccattatggacaaaatcatgcagaacgcgatgccatttcaaaattaaccccagaacaattatttaattcaactctctatgtcactcttgagccatgcaaccattatggtaaacagcctccctgctcagatttaattatcaaaagtgggattaaacgtgttgtagttggacaaatcgatccacacaaattagttactggaaaaggaattgccaaactacaagagaatggagttcaagtaactactggtgttttagctgatgacgcaagtaaacttaataagttctacagctatttttaccaatatgggtttccctggatcacagtcaaagaagcaactagtttagataataaagttgcaatgcgcggtcagcgaactccaatcactaatcaagcagtgtatcagcaagtgcattctgaacgtgcagattatcaagcaattatgattggttcttcgactgctatcattgatgaccctattttaagaactaatgtcaaaagtgactatccgccaatccgtattatcattgatcgtcgcggacggctgttaaatcatttacgacttcgcttattaagtgatacaaatcccacttggattttcactcaaaataagcaaatgtctaaaaacaactttactaattctaaaatcaaaattattcatttagcaacaaacaagatccaagaagtatttgattatttgagtacaaaagaaatccagtcagtttatgtagaaggtggccctactttggaaaaagcaattatgaatgaaatttttgttaatgaagtaattaaatatacggcgccgatctttcttggagatgaaggcgtaacaggtttagtaccaaacgaaactgtccctttaacaaatgttaaaaaaacagcctttggcaacaatgaacgaattgcaggtgaattaaaacatgtttagtggtctagttcgcggggatgctcatattaaaaaaattgataaacacaagcaaacaattaagctaaccgtttcgtgccctgcagactttactaatgagctaacggtcggtgattcaattgcaattaatgggacttgtttgacggttgaaagttttactgaaactagttttgttgtaaccatgatgcctcagacttataagaaaactgtttttaagaatttgcataacggtgatcaacttaacgttgagcgttcattagaagtcggtcaacgtttagaaggtcatcttgttacgggacatatcgatgatttggcaacagttactaaaatagcacagaatgaaaatgcaattgaaatttggtttaagtttcctgcccgattatcaacacagatcgtacctcaaggtagtattgctttaaatggcgtttcattaacagtgatggatgttaaagataacagtttttcggtaggtctaattccacatactcaagacgaaactaatttagccaacttacagataaatgatgaagtaaatttggaaaccgacattatcggaaaatatgttgcaaaaaatttagaaaagagaaattaaaatggatgttagaaaaattcaaaatgcaattcaatggatgaaaaatggtggtttagtgattgttgctgatgatgaagatcgtgaatctgaaggtgatatgatcggcttagggtctaaagttactcctgaaaatgttaactttatgaccaaacatgctcgtggcttactttgcacccctgtaagtaaaacaattgcccaacgtttaaatttctaccaaatggaacaaaataatactgatccatacggtacagcttttacaatcagtgttgattacaaaaccaccactacaggtatttctgcttatgatcgtgcggcaactatcaaggcaattgctgatcctacttccaagccagaagacttctttagaccaggtcactgttttccattagtcgctaaagatgatcaaatcaagaatcgtaatggtcacacagaagcctctattgccttagctcatcttgctggcgaaccagaagttgcatatatttgtgaagttatgaaagctgatggccatatggctcgtcgtccccaactgaaagaaattgctaaagaatatcacttaccatttttaacaattgcagaactacaagaatatattaatagtcctgtgagtaaacgctcagaatttgtaaaccttcctactaaatatggcaatttcaaaattaaggctttcgccaatgaaaacttagctattattaaaggaaagattgatcctaaaaagccagttttagtacgtcttcattcagaatgcctcactggtgatacgtttggctcaatgcgctgcgattgcggtgatcaattacatactgccatgaagcaaattaataaaaatggtagtggcataattctttatttacgacaagaaggacgcggaattggattaattaacaaattaaaagcttatggtttacaggaccaaggttatgacacttatgaagcaaatgaaattttaggttttaagccagatgaacgaaattatattattgctgccaagattttaaaagatctaggtattagtcatatcaatttgcttactaataatcctgataaaattgatcaattagaaaataacggtattactattgaaaaaagaattcccctggagattcctgctaatgaggtaaatcatgactatttagaaaccaaacgagataaattccatcatttattaggagcattatagtaaggaacacagaaatgaatatttacgaaggaaattttaaaaacaataattatcatatcgcaattgtcgcatctaagtttaacgaaattgttacccatcatttagttgatggtgctattgctagcttaaaacaatttggagtacttgaagatcagatcgatatctattgggtcccaggtgcttttgaaattggttttactgctaataagcttctcaattcaaataactacgatggtattatgactttaggcgctgtcattaaaggtgagactgatcattacagcatgattattcagaatgttacaaacgcaattatgcagatgaatcttaaagcagaagtcccaataacttttggtattttaaccactgagaatattgatcaagccttgcaacgatccggcttaaaagctggcaatgaaggttcctctactgctcagagtctattagaaatgatttcgctaaataaacaaataaagtaatagagtagagggagattaattctcgcccctctcattgcaccggacgtacggttccgtatccggcgctacgtttgtaatcatctacgagataaatagtattctagcggatcgaccaagcctgggcgatccgctttgcttatgcccaatacttttgggctaagcaaaaagttaacaacatgtccggtactgcgtttataccaacctaatcgcgtattagctactttatgaatatcttcgtcgctaaaattgcactttaatgccttgttaatccgcattaaattagtgtatattcttcttggcagtttccattgtttaatgattactacccgtatcttatggcgcagccattgactgaatttaaatagaaagtatttcataccgccaattttaaagtagttaatccaacctctgaccacttgatttaccttagtaaagactaacgatagaggttgagcagctgctttcctgcgacaaagaagctctctaatcttgttataaagcttggacaggattggcgaaagcggtccgccttgaggcacgccaatcttattgggcttaaccaaaccatcttccatgataccggattttaagaatgaccgaatcaaatggagggtggttttgtcatttactcgttctctaattattgaaattaatttatcatgattgaccgtgtcaaaatatttctcaatatctaaatcaattacccattgatatccatcatcttcatgattgcgtatttaatttctgcttgatgctttctgaaatagctatcaagttcttcaaccattcttttatctactcccggagcacctttattaatcttgactctatgaatcgcttctttaagattgctctgacttagaatctgttcaattaatttcatctcgtaatatctccatttctacttgtaaatttattcagaatcatcccaattgctttcaccatcaaagagttacgttctctttgtgctaggctatcctcttattcggactatctgaacattgcttatagcgggatatgctcttacaaacattaggtccttcgctccagtctcattacaagactttcaacactactatgacctcagctgacttcttgcgactaacctttttcgaccaggcttacgatcgctgatgttaaagcttgctcagcttgcctgtccgcaagatctctcggggtaagacattcatctttgattttccactgcctcctggtttaccgtcttgactttacgtttgtcttttggacttcgacttgtatcgcagccttatccgccatttggcctaaccaggtttctgtacgtaggctcggaaaactcgctagccacttccttcacccatagcgtcaccgctatcggcttgtggttcactacacttggcgacaaatacccgtggtccaaactttcattggattagatgaaatgtcatgcccgacacacaagtaaaaagccaccgaagcactaatacgcttggtgactcaaaggtctaattataagtttcttctactagtagctcatatggctttagcaagtaggtagctcccgtttctttgataggataattttgcacaacaacttttttgcgggaaatatgataattaattcttcctgaattgtcaaattaagtgcaacagttaggttatgaagagatatattgcttgaagagttcttctgctgtctgatattggaggattcggcgatatttgtggttaatggcattggttgcctgttgaacataagcttttgacttgtctttcatgtgcttgcccgatagtcaggaatcttgataactacttcaaagcgtgtggttctttcagtcaaagtcattaaagcaggctgattcttgcgtctgacgcctttaaccagatctccttcccagtgcagcggagcttttctgtcttcaatctctttaggacgctgttcaatggaattgccaagatgcttcttgtgcaaagcgtgaccgccatggctgtgatgacgcttgttcctgcgtcttttgagcttcataggcagatcaatattgcttatgtccagcaagccctgatcaatatagcgatagacagttggtgtgctgggacaagggtagcctggcatagtccttttgaattcaccaacgaactcatcgatgctggtggcatcaaatttagctttaaagcgtctggagagcattctcaaaaagacagcataatgcttcaatggattgcgctgatagcagtttttgcgacgcttctcataataaatctgtgcagtatcagcgtaatagtgctcatacaataaatagctgctgtctctttgcaggacacttccgcgtttgatttcgcgactgattgtcgacttatggcagccgacttcttgagcgataacagtacgggaagttatgccggaatccagcattgcttgaatttgtccacgttgtacgctggttaattgatgatagtgcttagaaatgctagaatttgaattggtcataaagatcttcctttcttgatttttcgtcacttcaagtttaggtcttcatggcctttttgtttaacacttagtgttgcacttcaattttaaatccgggaattatttttttagttaaatttgatgtaatatcagacaataaagaaatttttcctactccacgcatcccgtaaataatcgatatttgataacatcttcaaatgattcaactacattttcgactactttgtttctccctaaatatatttggggaactttaccaaagttagtatcaaatagatttttggcttctatagtttttcctccattttaaatttcttcagattttttgattttattttagatctaattacataataaaaagtaagctattacacttgctaaaatgaaatctaaactatttattacattgcttctcctattatgaaatgcttttaatgtctaattttgcttttttccatatcccagcaggtccaagccagcaataaaataatcagtacaataatagcataagcgaaaatcttggcatcttgcttaggcattatattaaatgaaacaaaggttgccggcaaattatataagttcaagaaaattaaaataatcgagctgatccagcctaagaccgaccagcttctcctatttttgaattgccccatcattcttttatcatcagtcataattaataatggaacaatcgaaaatgggacagcaaaagctaagaagacttgtgaattttctaaaagcatgttgagagcaaagtgctgctgagaaattgtgtcgttagctgtcataacaacgcaaatgataactggaattacggataatagccgagtaaataatcgtctcgcccaaagtggcatcttcaagtgaatgaagccttccattacaatctgaccagttaaagtccctgtaatagtagaattttgtcctgaagcaagaagtgctatggcaaagagaactgataaaattccagttttagctactgaaatcaaaattggattacttagcattgcagtattgcttaaagcatcataaagtccaaaaaatgaactatctttaaccgctccacttttaaaaacagctgctcccataattagcaaaagcacgttaacaaagaatgctagaataagttgaatatttgaatcccaagtagtaaaacgaactgcatttttgacatcatctggatcatgatgatttatctttcttgtttggcaaattgaagaatgcaaataaaagttatgcggcatcacagtggcaccaataatacctaaactacctgttaacggggaaagcccattaaccacgggatgttgtgcaactagttcgggactcggaaaaacagacaagaagatcttactccaattgggctctgctaacatgacttgataggcaaaaacaaataaaatcaccataatcaaacatgaaatcaaagcctctatttttctgaaaccaacctttgacaataataatagtagaaacacatcaaaaatagtgataaatgttgctataactagtggaattttaaataaaaggtttaaggcaatagctgcaccaataacttccgccacatctgttgccataattgctaattcaattacaatccaaagaataaagctcaatctcttactagttctagcacgaattgcctgcgctaaatccatttgcgtaacaattcctaatttagccgacatatattgcaacagcatggccattaaactggaaattaaaatagtagaaatcagtaaaaagttaaagctctgtccaccattgattgaagcagcccaattgcctgggtccatataacctacagcaactaatgcgccaggtcccgtataagcaaaaagcattctaaagaaattcttagttttaggaaccgcaatcgtactattaatctcagctagcgatttaccattagcatatgaaataaaactatgattttccatcaatggtgctcctatccatggattcctagtgtcattcgagcaatacgcgacatcatatttggattccattgcggataccagaccagtttaatttgacaatcatcgatttccgcaacgctctctgctgccttggtaatttcgttattcagccattcactcacaggacatcccataatagttagtgtcatcgtaatctggcaaagatgatcatttacctcaatgccataaatcaagcctaagtcaacaatatcaacttgcaattctggatcaattacatcttttaatgcctggtaaacatctttttcttgatcagataaattttctatttctaacattaaccaattgctccttccatttggaagctgatcaatcgattaagctcaacagcgtattccattggcagctgcttggtgaacggttcaacaaatcccataataatcatttcagtggcttttctttctgaaataccgcgactttccaaataatacaattgatcttcagaaattttagaaactgttgcctcatgttccatcgccacatttgagttttcaatcgcattagttgggatggtatctgaagatgattgatcatccataataatcgtgtcacattcaacatgcgccttagaaccgtccgactttttagaaaacttaacacttcctcgataatcagttgagccaccgcctttggcaattgacttagaaacaattgagctagaagtgttaggggcattatgaaacatccctgctccagaatcttgatgaatcccgtggtgtgccactgcaatcgaaagcatggtaccacgtgctccttcaccatttagataaacgctcggatatttcatggtcaccttggcacctaaatttccgtcaacccattccatcgtagcatgcttgccagcaacggctcttttagtttccaaactataaacattatcagaccagttttggatagttgtataacggcaatatgcattgtccaacacatttacttcaaccacagccgcatgaagagagtcagatgaatattgtggtgcagtacatccctcaacataatcaaggtgtgcatcttgatcaacgataatcaaagttctttcgaattgaccagaattttccgcatttaatctaaagtaagcttgaacaggtgcagggacttgaactcccttaggtacataaataaaagtgccacctgaccaaacagcacagtttaaggcagaaaacttatttaaatcaattggaactaatttgccaaaatatttttttaataaatctggatattcctgcaatgcagtatcagtatctgtaaagataatccctaatttatcaaattgctctttcatcttgtgataaaccatctcagattcatactgggcagctgaaccagctaaatattttctttctgcttgtggtacacctaagcgttcaaaagtatccttaatatcctgtggtacatcattccaatcacgatattttttatcagtcattttttgataataaagcatatcatctaagtctaaacccgaaagatcaggaccaaaactaggcattggcattttttcataaatatggaaggcctttaatcgataatctaacatccacttgggctcatgcttttcagccgaaatttgtctaattacattttctgttaaaccatgtcccgttgaaaattttggttttacattatcatgaaagccgaattgataatcttcatctttaactatttcttctgctttagtcattatcctcatcctcgttttctttaccaagtaatgctcgatctaatccccaccaagccaaggtggcacatttaatccgcgccgggaattccataatacttatcaagacttgagcgtcttctagtttttgcatgtcttgttcactacgttttttgccagctgctaagtctgaaaatatcctagaaaaactaatagcctgttcaatattttttccttttaccaattgggtcatcatactagctgaagccttactaatagtgcatccttccccatcaaaagcaatatctttaatttgatcattctcaaccaaaatagttaagtgaatcttatcaccacaagttggattataaacagtcgtttcattagtataattagcaagttgtccaaaattgcgtggagtttgagcatgatcgagaataactgctttatacaaactttttaatttatctaagctcaccgaaaaactcctttgcttcttgaattgaactaaccaattgatcaatatcattttttgtattatagattgagaaactagcacgtacagttgattctgtcttaaggctttccatcaatggttgtgcgcaatgatgccctgctctaacttctacaccatttaaatcaagtgctgttgctaaatcatgtggatgaatttttcttaaattaaaagaaatcacaccagtacgattactgcagtcttttggaccatacaccactaagtcatctatttttgataattcttttaaagcatatgctgttaaactatcctcatgtttttgaattaaagttaaatctaactttcctaaataatctattgcggcacctacgccgatcacgccagaaatattcggagttcctgcttcaaacttttgaggcacaggtgcccaggtagctccttttctagttacatttgtaatcatttcaccaccaaaacgataaggcggcatttgttctaacagagcttttttgccataaagcacacctactccagttggcgcaaacattttatgtcctgaaaatgcataaaagtcagcatctaaatcagtcacattaaccggaaagtgtccgacggcttgagcgccatctactacaacaatcgcgccatttttatgagctaagcttgttaaagccgcaataggattaattgtccccaaaacattgcttacatgagtaatcgctacaattttagtttttgtagtaattttactttttgcatcttccagatctaaacgaccattagcatcaatttcaataaactttaacttagcgttctttcttaaagcaatctgctgccaaggcaaaaaattgctatgatgttccataattgaaacaacaatttcatccccagcttggatattttgctcaccataagttgccgcaactaagttcaaactatctgtgcaaccactagtaaatacaatttcacttgcatttttggcaccaataaagtcagctactttttgacgggcattttcatatttttgtgtagcccttagccctaaagtatgaacaccgcggtgaacattagcgcgatcaaaattagtaaaatgttcaatctgtttttctacaactaacggcatttgactagttgctgcattatcaagatagatcaatttttcatcattaattttttgattaagaattggaaaatctgctttaattttcttaacgtctagtttgtccatcaattaattttttttccaaaatatcaatcatcttttgccgaacttccttattaggaattgcatcaagaacagcccctaagaacccgcgaattaccaatctttgagcttgatcatatggaataccacgactcattaaataattcatttgaatttgatcaacaggacccacactagccgcatgagcagcaataacatcattttcatcaattaaaagcagtgggttggcatctccatgtgcattatcagacatcattaaaactctattttgttgatcagccttagagccatgtgcaccatgaacaatctgaccaattccattaaaaattagttgagaattttcaagtaaaacaccacgttgatttatcaaaccagttgaatgtggcccgcggttggttactcggttgttaataccgactctttgatcaccagttgtaactgcaattgccttagaatccgcataactgccttcgccaattaattctgaatccaaatcgcctaaggtgttgcagtcattcataaaagcaattgcccattcaacatgtgcatcattttcaattcttgcacggcgattaaagtaaagcgttgtatccttatccatttcatcaagggatgaaaattcaacatgactacctggatgtgcaacgatttccaccattaagtttgcggatttaactgctttatcctcattttgaatttcttccaagaatttcacttgactgttatcctccgtaacaatcaataaatgtgaaatatatggatcttgcgtagggttcaaagtaactgtaattggttcggctaaaactgtatttttaggaatataaagaaataagcctgaatttaaatacgcataatgataagccgttaatttatcttcatcatttttaataacggaagctaatgcggatttaactaaatctggatattgctttattgctgtaaaaagatcgcataagatgattcccttatcgttaagaagatcatgattctctttttttataaaaaagtcaggttggttttgccacttaaaatcttctttagcaatcaacggccaatcttgataggaaaaacgctgcattttgggataagaaagtttatgcatcttttcaaaagaactagtccttaaatcagttaaccaggaaggctcgttgttttcctttgatgagacaagtatgttttctttgctcaacatttgacgttttcccccctaattttcatcaactaacttaatatgtaacccaagttcatcgcgaagacctgcatatccttctttttcaagttttttagctaaatctggtccaccgtctttaacaatacgtccatccatcatgacatgaaccacgtcaggcacaatataatcaagcaaacgctggtagtgtgtaatcattaaagcaccaaagttgtcaccgcgcatggcattaactccccgtgatacaactcttaaggcatcaatatctagacctgagtcgatttcatcaagaatgccaaaacttggtttaatcattaacatctgcaaaatttcgttacgtttcttttcaccgccagaaaagccctcattcagataacgctcggtcatggcttccttcatatctagcaaatccagatttttatctaattcattcaaaaaagtcatcactgaaatcggatcatcttttggtcggcgagcattaattgctacccgcaaaaattcagcattagtcacgccaggaacttctgctggatactgcatagctaaaaataatccttttctagcgcgttcatcaactggcatgttaataatgctttcaccgtttagcaaaatatcgccttgcgttatgtgatagcgaggattccccatgatagtctcagataaagttgattttcctgttccattaggtcccataattgcatgaatttcacctgtcttgagagttaggttcacgcctttaagaatctttttactcgtttttttatctttgtcttcaacttctacatgtaaatccttgatctctaaagttgccatttaaatcctctttttctacatttggtattgctgcttaactatcaaatacaacatatagataatataacgcaaaaaaaattttattttcagtcttgacttttaacctaacatgtttgcgtagtcgaaactgtcaaatcttttgtgtaaatagttctttctcgcaaattgattttttaattatttattcaaaataagattctaaggtatcctgaacctgaccaaagcctttatgaattcggttgaaatagcggtcattgtagctcattgcctggatgccaataaatgcatcaagcgactgttcagttggaaattctgccttaggcttagctttacgcttgatgacgttgttaaaggattcaatcatattggttgaataaattgaagctctgatttgtttgggataattgtagaagaccagcagatcgggctcaatttccttcaaacctttgatgacattgctataagctttattccatctggcatagaatttgtgcaagacagctgcagcttcttttttgcttgtctgttgatgtatctgcttgaattcgttcatgatcttttcgcggtcatccacccggactttagcacagatattgcgcatgacatgaaccaagcagcgttgaaaatgagctttaggataagtcctggccaaggctgttttcatgccaacaacaccatcagaaagaaaaagctcaacttgctttaagcctcgggatttcatgttttgaagcatatctgtccagacttcaatgttctcgctaggtgcaatgcagtagtcaatgacctccttgtgcccattaggcttgatgccaatggcaatatagactgcttcacgctcaaacgtttctcggcgcaaaggaaggtatgtcgcatccaaatagacacagaaaaacttgtcgcttagcttgcgcttgtgataagcctcaaccttggggagcatctgcttggaaatatttgatacttgagctggactataatgactgccatacattttctcaatcaagtcagcgatttctctggtagttacgcctttggagtagagcttgataatcgtgctttccaaaacatcagagtgctgcttgtagtcaggcagcgtgtgctgataaaactgaccgttgcggtctcgaggcacttgcacttcaattggtccaaactgggtatcaaccttgcggaaataagcaccatttctagaattgccagtattccagccatttctggcatagggatcatagcctagaaaggcagtcaactcagcttctagcaagttattaacagcctgttgtagctctttgcgcaataaatcatttattttgtctggattgaatagagcttgagcaaaatctttggtaaaatcattcatgaaggagttcttctttctgtatgtgtttttttgttcaaaccaatcatacgagaaaggaactcctttttctaatgtttaaagaaataaatttaaggaatcattcatccttacacaaactattttacagtctcgcgtagtcatgaactggcacttgaagtgttaaatcagaaattagaaatgtaacacaagtgttgacatagttgtattcactatcggctgcacgacgtccaggaaatggaataaatacttttccattaactactcttgaacgacatgcaccacaaacgcctgagcgacatgatgaaggggcaataatacctgctctttccattgccaccagcaaactttcatcacttcttgctggaataacttgtatttgatcacgggttttaactgtcatgttgaaagtcttattctttgcttcctcaggataattcttgaaaaagtatggatttactgaaccggacatttcttgtcttacttgccctggacgaagatctaactttttaatttcttgatttacaaaatgaatcatcgcagctggaccactcatataaatagaataattcttatctgctggagcatatttttcaatgatggcctgattgataaagccatgttcatatccttctcgtattatataaattaaatcgtattatataaattaaatcagtgataatgattattcttttagtttgtttattcgatcatcagatgctagtctctaattgtcattgaccttggtcaattggtataggttgtttccttctgtagctttgactacttttttagtctgccgcccaagcagttttactaatgacttactcacatgctgtatcgattctggctattactgattcagagcagattcagtcgcagctttttagcttgaacctatgaatacttatattttgcgagattgtcttagaatctgtaattagggactaacatgtgatgatcgatctatgaccaaatatttgctagaaaggaggccattctcaatgaaactttttatcggaattgacgttagttcaaaagatcttcaagtcgctattactgactcagaaaattatcaaaaacctttacttaaccaatctttttctaatgacctgattggtgctaatgaggtcaaaaagataattcttcaacttgctaaacagaacagctatgacaaagtaattatcggcatggaagccacttcaatctatagctttcaccctgcttatttctttgccaatgacgaagatttacaaaaaattaatcttgaaactgatgtcattaatcctaaaaacactaaacgatttcatgacgtttacgaagaaaataagaatgatcctactgatgcctattacatcgctgaatacttacgctttggtaaataccatgtcactattgctcggcaagaggaatacttagctttacagcgtttaactagagctagatatgaaatcacatcttcgctcactagagctaagcagcacttcattgaaactctttattatcgtgtaaacaaactagttaccgttgacaaagacaatattaaaacttctatctttggcgcaacgatgctgtcaattgttactgatagtaaaaccatcgatgaaatcgctgaaatgccaatcgaggatctaattgactaccttcaaaccaaaggacgtggccgcttctctgatccagagactttagctaaagcgatcagaaaagccgttagaggatcatatcgcttaggtaaagtcatgaaagactcgattgatgccgtattatctgtttactatgccgaaattaaaactaatcagaaattgattaagaacttagataaagcaattacagatatcgtccaaacgcttcctgaagagagaatactacaatctattccaggaattgggtcagtttattccgctggtattatcgctgaaatcggcagtattgatcgctttgacactgaagcacagctagctaaatacgctggtctagcttggcgtcaaaagcaatctagtaattttgatagcgaacacaaaccgatgactaaaaacggaaatcattatctaagatattatttggttgaagctgccaacctgattagacaaagagatcccgtttttcggaagtactatcaaaagaaatacgatgaagctttctattctccgcataaacgcgcttgcgttctttgtgcaagaaaattaaccaggaccattttcactctgctcaaaaatggtcaaatctatcaaacaccgaggtgattaattggtctaaaacatttttggaggagtaaataatagttgttaaaaaatcccttgaaatagggcttagtttcatgcacgcaaattttggttttaaaacaaactaattaaaaataaaatttaacttttacattgacttattaccacatgactacttcttcatcacttaatatgttaacgaccttgaccttatcagttttggcagcaattctatctaattcatcacccaacaaaatatggttgtgcgttctacttccatataaaataatcaaatttgcatcaattgtgccatcagcaattgcaccagccattgagtaaaatggtgtaataccgctgccaccagcaataatggtcttcttgtctcttaatggttcatagaataattgaccagcaggacccgaagcagctacttcagtgccaaccttccaattctcccaaatataaggagttacatacccatttttgactaacttaattgtgagcatatattcgccagaaagcgcctgcttaggtgtgcttgaaatggcataagcacgtgtacaataacttttaccaatatgaagttttaaagaaatatattgacctgcttggaaatatgcaagtttgctggtaccttttgattcatctggtacaaatacaaagctcttagcatcgtcacggtcaataatcttagtgattttcaaatattgcgtttcaggatgaagctcctcttcaagaatgttcatcggatattttttaggcaactctgcatccgaagcattttgaatttcatgttttcgctcattttgaagcttctttaaatcaataattcccttaatctcttcaaatttattcatgatctgctcccatattattaatatcactaacagctatttttgctgcagttaaaccagtagtgtatgaaacattgtaaccatcacacataaatccatgacccccgcagaaatataaatgtggcagtggatttacaacgttctttaaatccattgatctaccaataatttgatcccatggtgcacaatgatagccataaatttcaccatcaggtgttcccatatagcgagcaaatgttggtggtgcagcaattgcaatctcttctatagaatcactaattttaatacctgttgcctgttcatactcatcaatagcatttttagctattttaactttaagtttttcataatctttgggtttaacattatcccaaacaccatcatcaactaatttagtaatgtagcaaacactagttcccttaggagaagcatttggaatgacagtatttaagcaattcatgatcataaaatcatttttatccatagttttacaattttcatattgttttctagtatcacctgttgaagcaatgaacacactatagtcatttattccaagttctcgacaggatttatttagcccaagatacaccaaaaaggcactggttcctaatttatgtgagtttgcatattttaaagcatactcaggaatacacttttgatccatcatgttgccataaactgcgtgaggagtaattccacaaataacttccttagcaaaaactttttcacctttaatttgcacaccaacagcttgaccattttcaactaagattttttctacagttgtactcagccaaacatcaccaccattatcataaattacttgtgccaatgctgttgacatatcatgacttcttctttgaggaatataggcatcgttttctacataagtagctaacatagtggcaaaatacggaaattcaaattcatcagtgggaatatcaatgtaacaccaatatgctccaagaatttgttgagcttttttaggaagttttaatttgttaagcacatcatcccaactcttagtagcatactcgataaaagctggatatttttttataacttcttttttatcctttccatctgctatttctgctaacgcattcatactttgctcacacagatcaaaaagcttttccatcttttctgaagtacctggtacatatttttccatcgcattaataaaattttctctaccagctggcatcttaacatcaaatccgtctttaccataaataatatagcgataagtatctggtaattcttgcatttttacgttggcacctaaccagtcatacatttttcgtactgcacgcggattatcagcatgaccatattcacataattcatgcaaggctacttcaaactcaaatctgccgcgaataaaactggttgctgctccaccagccagattatgtctttcaatcaatagagtttttttgcccattctagcagaacttgcggcggccattaagccgccattgccagccccaactacgataacatcatatttttcagccattttttaaccctttcgttttcaaatgattacgttttcattataattaatatgaattaaaaaaaggatcaaagtaaagaaaaacaaagttattttatataaactagccgttggcttctggtcctaccagtgcaaaggagaataatatgaaatttcacccaataaatgtacccactgcaacagatttattcttcgttaatcaattaaaaacagcaatcttaacaggaaagtttaacctcggcgataaattacccagtgaaagagttttacaagaacaacttcaagtaagtcgaactgtgatcaattccggattaaaaaaattagcggcattacattttatagaaattcgtcctagatatggggcttttgtagcagattatcgtgtcgatggcgatttgcaaacaatgaacgaaattattaatttctacgggggacattaccgaatttcacttttaaattcgatttttgaaatcaggaaactaattgaaaatgatgttgttcgcttagattgtatagaacaggatgaacaatgcctgcaatcagctatttcaaatatgcaaaatcttgccaaagccaccaattccaaggacgctgcacaagaaatatttgcttatgtacatagtttagccttggcctccaagaattatgtttatcctttgcttatcaataactttaaatcaatctatttaactttaggtgaatggatctgtaatgaagtcgatgttaattctatttctgaagagaatctaaaattaattaaattaatcaaatcaggagataaaaatatagcaattgcttataataacaaactgattaattggagttacgagattttaactaagcaataaaaaaacggtcgatttgcttttcgaccatttttacgcacgttttgcgcgcgattatttatttaaaacatattttgtagatctaccctcaccaattctctcaacataaccttgctttgttagttgtttaagtagatttaaaacttttgttttaccaaaattacttgctcgactaatttgtgtagaagtatttgcaccctcgcgaatggttctaaatactttcttttcatcatcgcttaaatcatcagtaataaattttagaattggtaaaattatttttattgaattttcaaagatctcgaactgtggttgaactaaacttccttgataggaatctttaattctctttattcctgtaccaaattgttcaattaaacccaatctaaaaaagacattagccacaataggatttcttaaaatagaaatttgacctgacagatactcatctttactcaagttatgaggtaatcctcctggagaaactacttctattcgattatcaaacatagaaactttaatttgagcattaatattccaagtcctatgaaccaaggcattagctattgcttcacgaaaagcttcttcaggaatttgacttataacgttacgagtaacaccatgtatttcctcacgctgataatactgccgatatttttgaatagtttggtcatactctttaagaattgattcattctcatagtttgccctatccagcataatattaatattttcaccaaagcgaacgacatcaatcccacgataatgatttttatctgctaataattcacccgcattagtatatccggcattcttctgttctagattaagagtaattagcacatcggatgtcaatttattaattcctagtttttcttttagtgccatttctaaaatattaaacgatagattttgatttgcagctgttaaactgtcataagtcttattttcgccaatcaaaattagttgtgataattctgttctatccacttcaattgaagcactatcatttcttttataagcttttgctttatataaatatggtggattatcgccctgttttaccgtcaacgtgactacattagttttatcatcaatctctaaattataatctggatgtggctggatggaatcatttattttattctctacatttaaacaaaaatcaattggattttttacaccaataattgttccatcatcctttataccaaatttaacttctcctgtaccataatttgcatacgcactaaccgtttttaaaaatgtgtttgtaagattctctttaaattctaaattctttgtttctctcacttaagtcaccttgccaatctattttatctacaattatactctttcgcacacaaaaaaacggtcgattttattttcgaccgtttttacgcacgctttgcgcgattatttatttttcgttcacgataatcaatgacttaattgcttcacgattgctcattgcttcgtatgcttcttggatatgatctaaatcaaaactcttagtaaatacttttcctgggttaatttttccatcaagaacagcttgtaaaagaacttctttatcaggcttagttactgaagcaataccaccgcgaagaccgacatttttccagaataattggtttgacttaggctctgcatgtggtacacctactctaccgattaccgcacctggacgagcaatttgaccagcttgttcaattgcactttcagcacctacacactctaagaatgcatcagcaccagcattttccttagttaaagccagtacatctttaactgcttgatcatcacgacttgaaacaatgtcagttgcaccaaattcttttcctaattgtgcacgatcatcgtggtgggataaaagaatgattttttcagcgcccaacaacttagcaccaataacaccggcaagaccaacggcaccatcaccgataactgcaacagtatcgcccttcttaacttcagcgtttaatgctgcgtggtaaccagttgccataacatctgacaatgtttgaagggatgccaattgatcatcagtataatctcctggcttaccgggaatcttaactaatccagagtttgctggttcatatttcataaattcggcttgatagccaccgttagtacccggcttcaaattcaagcaattgccttcaaaaccattaatacatgcaacacaatgaccatatccatgagtaagagactgtaaaatagtttgtgtaaggatgaataattccttaaatttatttctttaaacattagaaaaaggagttcctttctcgtatgattggtttgaacaaaaaaacacatacagaaagaagaactccttcatgaatgattttaccaaagattttgctcaagctctattcaatccagacaaaataaatgatttattgcgcaaagagctacaacaggctgttaataacttgctagaagctgagttaactgcctttctaggctatgatccctatgccagaaatggctggaatactggcaattctagaaatggtgcttatttccgcaaggttgatacccagtttggaccaattgaagtgcaagtgcctcgagaccgcaacggtcagttttatcagcacacgctgcctgactacaagcagcactctgatgttttggaaagcacgattatcaagctctactccaaaggcgtaactaccagagaaatcgctgacttgattgagaaaatgtatggcagtcattatagtccagctcaagtatcaaatatttccaagcagatgctccccaaggttgaggcttatcacaagcgcaagctaagcgacaagtttttctgtgtctatttggatgcgacataccttcctttgcgccgagaaacgtttgagcgtgaagcagtatatattgccattggcattaaacctaatggacataaggaagtcattgactactgcattgctcctagtgagaacattgaagtctggacagagatgcttcaaaacatgaagtccagaggcttgaagcaagttgaactctttctttctgatggtgttgttggcatgaaaacagccttggccaggacttatcctaaagctcattttcaacgctgcctggttcatgtcatgcgcaatatctgtgctaaagtccgggtggatgaccgcgaaaagatcatgaacgaattcaagcagatacatcaacagacaagcaaaaaagaagctgcagctgtcttgcacaaattctatgccagatggaataaagcttatagcaatgtcatcaaaggtttgaaggaaattgagcccgatctgctggtcttctacaattatcccaaacaaatcagagcttcaatttattcaaccaatatgattgaatcctttaacaacgtcatcaagcgtaaagctaagcctaaggcagaatttccaactgaacagtcgcttgatgcatttattggcatccaggcaatgagctacaatgaccgctatttcaaccgaattcataaaggctttggtcaggttcaggataccttagaatcctattttgattaaataaatgattaaaaaatcaatttacgagaaagaactatttacacaaaagatttgacagtttcatgagtaaatggtacgagaacaaaatcatttggtttaatattagttacctcatcactaacttcttcaacgacaccaattgcctcatggccaattaaagacccactttcacgatcagcaattcctctaaaccaccataagtctgaaccacaaacacttgcacgtataacacgaataattgcttgattttcaccatcgatttttggctttggaacttctcttacttcaactttacctggttctacaaaaactgctgctttcatattatttctccttactatcgtttactttatatacatagtctaatcaaaacagactgtctataaaattactaatattaaatgctactattcaaaaaacgtatagtaatacgcgtggtgctagttaaatcgttttagttaataaaaaagtccaatcttgttagactcgacttgtaaatagtaataatagaaaagagtctgatctgattgaactgccttaagcttaagcgttttagccaccatttacaagttagttttaaagatttagtgataatttgtcggcactggtatcgtttgtatgcaccggctgagtttactcatcggcgaaatattgatcaaattaaaactacggacagtctgattttggctttacttatctggcaagctaagacaggaattgaatcacaaagaagattctgtgaatgtttcaattgtttatcacactcacgttttaatcggcgttcacgtcagctattgcaattgatttatcagatacggcaagaaatgaataaaaaggttgacctgaatggacagttcttgatcattgacagctttccggtacctgtttgccaaccaattcgaaactatcgtgctaaaatttttcgcggttatgccaacattggttataaggccaccaagaaaatttacttctatggtttcaaagttcatgccattgttagcgatgacggttacattcttgattatgtcgtaacaaaggcatcagttcatgatgccagggagacagttgaactgatagaaaatacccatccatctaattactatcttcttggcgacgaaggctatttaggcaaagaactgcatcaacagctaaaacaaatgggttacgaactttggacaccatatcgtaaaaatatgacaggagctaaaaagcacaatgatcatcaattgatggctattcgcagaacaattgaaagcgacttttcgcttctgacctattacaatgccgagaacaatcgagcacgtagtctgataggctttcaaagccggttggaaattgcaattttagcttataatttggcttattgtctagaacgatttaactagcaccacgcgtaactattatatattttgttatcgcttttatcaaattatatgttttatgtaataaaaaatgtgcccgaacaagcacatttttaagtaagtttaaaagaaaattttactcataataatcatgaataccaacaaacaagttgagctaactgcggcagccccaaagactgaaccgccacgcttaaagattaccttgaagttaacggaaattcccaatgcagccattgccatccctaaaaagacatatgctgcttgcactaagaagtctaaagtccgcgcagacattggtaaaaatgtaccaataatactagttaagataaatccacccaagaaccaaggaattggtaatttcttcggtgctctagtatgttctgcttcactttccgtaaccaaacgcttttggtaccaatagcccacaattaaagcaaccggtgctaaaagtaatacacgagataacttcataattagagcgctatccaaactgacttcaccaaaagcacttcccgctgcaaccgcatgagcaatttcgtgtaaagatccacccgctactaccccatattgtgtatcagttaagccaagaagcggtttgagcacgatttcaagtaatgtaaacaccgttcccatgacacaaacaacagccaccgctagaacttcgttttctctttttctgtcttcatcgcttgtctcaatttgtggtgacacgcccataacggcagctgcaccacaaactccacaaccacaagccgacaaaatagctaactcatcttcagcaccaaacttacggctaagccaataagtaagcacaattgttccactaactgccagcgccgcaaccagtatagtcttaactcctgcatcagccaacttagtcaaattgagtctaaatcctaacaagataatccctaatcttaaaaacttgttggaaataaaacccatgccagctttcgcttcagcttgtacgctctgaggcgttatttgcagtgcaatccctaataacaatgcaattaccaatgccccgattaagtttacgtatggcaatttagccaagaaaattcctgctacagaacaaaataaggtcatcgccgtagctaaccagaatgatttagttttaattatgtttgtcaacaaaaatccctccatatgtgatctgtttaatttgacaaacacaactccctttatgatgattgtaataagtatactattattttctattcttgacaaggcaaattattaataaattcacattaactaaaaataaaatattttggcattatttagttaagtaggttataatacttttgttacggagtgttggcagagtggtaatgcaccggactcgaaatccggcgaaccaagttttccttggcgcgcaggttcaaatcctgtacactccttttgtcaatatgtggaaaagaccaagtgcaatgcttggtcttttttatcttagtcatttttaatatttaaatgctacacttgctaatagcacattatttaaagatatagaaaagagattatatattatgtgtacttcaattattttcagtccacaagatcactattttggacgtaacctcgatcttgagattactttcggccaacaagttgtagttaccccacgcaattatgctttcaacttccgcaagatgcctgaaatgaagcatcattatgctatggttggtattgcacttgatgctggtaattatccgctctactttgacgcagctaatgaaaaaggtttaggcatggcaggacttaactaccctgacaatgctacctactatgatgaagttgccaataaagacaacattgcttcatttgaatttattccctggattctgggtcaatgcgcaactgtagcggatgctaaggtattacttaaaaagatcaacattgttaaccttaatttctctgacaagatgcaggcatccccacttcattggttaattgccgataagacaggtgtttcaattgtcgttgaaaccgataaagatggaatgcacgtttatgataatcctgtcggttgcctgactaacaatcctcagttttcatgtcaattatttaatttaaataattatgctgatgtttcacctgcaatgcctaagaacaacttttcaaaagaggtcaatatgaatggctacagccgtgggcttggttcacgcaatttgccaggtgggatggattcagaatcgcgctttgttcgtgtagcttttaacaagttcaacgctcctgttggtaaaagtgaggaagaaaacgtagacaattacttccatattttgcattctgttgaacaacaaaagggacttgatcaagttggccctaattcatttgaatacactatttactctgatggtaccaaccttgacaaggggattttctattacactacttatactagtcagcaaattaatgtcgttgacataaacaaagaagacctcgatgctaaggaattaatcaagtatgatatgttaactaagccaacatttaatcaccaaaactaaataattgaaaaataatgttaattttattcccggatttaaaattgaagtgcaacactaagtgttaaacaaaaaggccatgaagacctaaacttgaagtgacgaaaaatcaagaaaggaagatcttcatgaccaattcaaattctagcatttctaagcactatcatcaattaaccagcgtacaacgtggacaaattcaagcaatgctggattccggcataacttcccgtactgttatcgctcaagaagtcggctgccataagtcgacaatcagtcgcgaaatcaaacgcggaagtgtcctgcaaagagacagcagctatttattgtatgagcactattacgctgatactgcacagatttattatgagaagcgtcgcaaaaactgctatcagcgcaatccattgaagcattatgctgtctttttgagaatgctctccagacgctttaaagctaaatttgatgccaccagcatcgatgagttcgttggtgaattcaaaaggactatgccaggctacccttgtcccagcacaccaaccgtctatcgctatattgatcagggcttgctggacataagcaatattgatctgcctatgaagctcaaaagacgcaggaacaagcgtcatcacagccatggcggtcacgctttgcacaagaagcatcttggcaattccattgaacagcgtcctaaggaggttgaagacagaaaagctccgctgcactgggaaggagatctggttaaaggcgtcagacgcaagaatcagcctgctttaatgactttgactgaaagaaccacacgctttgaagtagttatcaagattcctgactatcgggcaagcacatgccaaaggctgcttcaaaaggagattgacagacatcctgcctggtttaaatcaatcacgtttgacaatggctctgagtttgcggatatgaccaagatcaagggctgccagatttactttgctcacccatattctccatgggaaaggggcaccaatgagaactgcaatggtcttttgcgtcaattcttccctaagagcaagagcatgaaagacaagtcaaaagcttatgttcaacaggcaactgatgccattaaccacaaatatcgccgaatcctccaatatcacacagcagaggaactcttcaagcaatatatctcttcataacctaactgttgcacttaatttgacaattcaggtgttaattttatttaaagattagcattatttttgtttttccggttaaaatagattgtacttatatagtaattggggattttcttattaatgaataattattttgtactgctactgtctgcggcagttttgctctggcttatttttaatatcaaaaattcacgtcgtttcaatctatttgatcactggcttcaccaccaattggtcaaacgtcatgattgctacagctggcaggttatcgcttttattaatgatcctaaactaatggtcgtttgggatgtattattagcaggcctacttttaaacgaagaacgaaatctaaccgctctttgggtattaggaactctaggatttgctgacatttctggtattattctaaaaaaacttattcggcgcaagcgaccattattacattccgataaagaagatggctatagctttcccagcggtcatgttttaggtgccacaaccatgggcttaatcgtactacaactatttgccaaagatcttggaaccggatttgttattgccgtagtagctatttgggcaatggtaattttctctcgtttaagtttaaaggcccactatccttctgatgttcttggtgctactagtttagcaatcgtttgtttcagtatttcgcagcaactatttttagcgatttaaaaaggatcacgttcagcacttgagcgtgatccttattttttattcatgaaagcctaccataatgccgccttcttcagcatagaaactacataaagcatgcattggacgaatagtaatttgagcttcagggtattcctccaatattttatttttaattatttctgcatctttttcattttcgcaatgatcgattatcacttcgccaccgtgataattatcttccttcatatacttaataatttcacggatggcctttttcattccacgagccttagtaagtggctcaagttttccttctttacttgctgttccgatcaagttgattttgagcaaacctgcgattttggctacagctggtgaaacacgaccgtttaaagataaattatgtagtgattgcaaaacaaaaagcaaatgagtctgcattctaaacttagcaattgcttcttctagatctacaaagcgcatttcaccttgcagcattttctcaataccatggactatgattgctagctcaggtcccgcacttcttgaatcaactactataattttgctcaagggatgtttttcctcatacattgcttttgcctgaagggctgaagaaaaagtgccactcatcccgctggtcattgtgacgataatcgctttttctgttccttcaagtgcgtcaagccatgcttgaatacttggacaagttgttttgcctgccacattattttggttcatattggacaaaaattccttcatattcaaatcttgattatcaaggtagtcctcaccaccaaaagaaattgtcagaggcactacttccaaattacgcgccggatcattattcatattggcacttgagtcaacaattaatttaatattttccattttagattccttattttttgtatttattttaatacatatattatagtcctttgatatagagttttttaggctgctttactaatttttaaaatgtaaaccgctttcatatgtttacaccgtcacaaagttaggctaaaatttgagatgtaaagcggagcaaaaattgttccgtatggtatgaaaaacataccataatttttgaggaggtttattaatgctcaaatcagttattgaaaatgtacacgcacttgaaattttcgactcacgtggtaacccaactgttgaagttcacgttactctttcaaacggtgtcgtaggtaaggctgaagttccatcaggtgcttcaactggtgaaaacgaagctgttgaattacgtgacggtggttcacgtcttggtggtaagggtgtttcaaaggctgttaacaacgttaacactgaaattaacgatgctcttaagggtatggacccatacaaccaaccaaagattgacaagaccatgattgacttagacggtactccaaacaagggtcgtcttggtgccaacgctatcttaggtgtatctatggctgttgcagttgcagctgctaacgatgctcaccttccattgtacagataccttggcggtactgatcttgaaatgccacaaactttccacaacgttatcaacggtggtgaacacgctgacaacggtatcgacattcaagaattcatgatcactccagttgctaagacttcattccgtgacggtttcgaaaagatcgttaacgtataccacaccttgaagaaggttcttgaagacatgggttacgaaactggtttaggtgacgaaggtggtttcgctcctaacatgaagaactcagaagaagctttgaaggctcttcacgaatcaatcatcaaggctggttacaagccaggtgaagatatcgctattgcatgtgactgtgctgcttcatacttctacaacaaggatgatcacaagtaccaccttgaaggtaaggttcttactgatgaagaattagcagattactacgacaagcttttggacgaattcccagaattaatttctatggaagacccatacgacgaaaacgatgttgacggtatggttaagttcactaagagccacaaggaccgtatccaaatcgttcttgacgacttcatttgtactaaccctgcacttttgactaaggctatcaaggaaggtgctggtaacgcttcacttatcaagttgaaccaaatcggtactgttactgaaacccttgaaactatccgtctttcacgtaagaacggttacaacactatgatttctcaccgttcaggtgaaactggtgacaccttcatcgctgacttagctgttgctgttaacggtggtcaacttaagaccggtgctccagctcgttcagaacgtgttgaaaagtacaaccgcttacttgaaatcgaagaagaacttggcgaaggcgaacgtcttgcattcttcccagacgatgttgaccacgattaatttcgagttaaccgagtacaatttcaaaaaaagcatgagaattaattttctcatgcttttttgttgcgcttttacatatttattttatcaatttgctaaaagccttatttaaagtgcgatccttaactacttttaccataattggattttcgtttttagattgatcaagcaagataattggatttttatccttcaaacagaacaagtaagtattatgccacgatttaaaatcatcattagcaatggcaagcacattatagtcatattttgttttgccaattggactgtagccgatctcaattgtttttttatttagaataaatcgattagtagtcaatactttggggtaagttgcaccctttttagtctttaaactcttttttccatcatagaattgataagtttgccctgacttttcaccccagttattaactttcctttttagtttaacagttttagcggcatcccagattctagttgctttttctttatctttcctcttatctggcttagccttctgtttaggcttaacttgttttttgtctgaaaattgcttttttactggttttgttttctttttagcaaccccggatttaaaattgaagtgcaacactaagtgttaaacaaaaaggccatgaagacctaaacttgaagtgacgaaaaatcaagaaaggaagatcttcatgaccaattcaaattctagcatttctaagcactatcatcaattaaccagcgtacaacgtggacaaattcaagcaatgctggattccggcataacttcccgtactgttatcgctcaagaagttggctgccataagtcgacaatcagtcgcgaaatcaaacgcggaagcgtcctgcaaagagacagcagctatttattgtatgagcactattacgctgatactgcacagatttattatgagaagcgtcgcaaaaactgctatcagcgcaatccattgaagcattatgctgtctttttgagaatgctctccagacgctttaaagctaaatttgatgccaccagcatcgatgagttcgttggtgaattcaaaaggactatgccaggctacccttgtcccagcacaccaaccgtctatcgctatattgatcagggcttgctggacataagcaatattgatctgcctatgaagctcaaaagacgcaggaacaagcgtcatcacagccatggcggtcacgctttgcacaagaagcatcttggcaattccattgaacagcgtcctaaggaggttgaagacagaaaagctccgctgcactgggaaggagatctggttaaaggcgtcagacgcaagaatcagcctgctttaatgactttgactgaaagaaccacacgctttgaagtagttatcaagattcctgactatcgggcaagcacatgccaaaggctgcttcaaaaggagattgacagacatcctgcctggtttaaatcaatcacgtttgacaatggctctgagtttgcggatatgaccaagatcaagggctgccagatttactttgctcacccatattctccatgggaaaggggcaccaatgagaactgcaatggtcttttgcgtcaattcttccctaagggcaagagcatgaaagacaagtcaaaagcttatgttcaacaggcaactgatgccattaaccacaaatatcgccgaatcctccaatatcacacagcagaggaactcttcaagcaatatatctcttcataacctaactgttgcacttaatttgacaattcaggtctttttagcaactgttgttttcttagctttttttacttcaccaatagttactgcatctttaccgaaataaacttgactacaaccagttaaagtcgttgctaaggtaattgcagcgagtcctattaaaatttttctattcataattgctccatttattatttcttataatattattgcataaaatagtctcattaaactttaggcaaaaaaatagagctaattttccaattagctcgcggttttttaataaatggtgacttgataacgattggaacgatctgtttcttctggtttttcagcaatcttcccaactggcactataacactcgtttgaaaggcaggatcaatgcctaattctttttgcaattcaccggcatcatttaacctaactgcaccgcccatgacataaactgaacctaatcctaagtctgttgctgccagcataatattttctgctgcacaagatgcgtctcgttcaccaaacatgctatcttttttggtattaattacaaacaataccggtgcattgtagcaagcattatcagttttttctttgatcttattgcgtaatccttcatccttaaccacaactagattcatcacatctgtttgattcatcccacaaggtgcagtttgaaaagcgacaatcaagttcttaagatcatcatctgaaatactttctttactaaaatctctaactgctcttcgattagtaaaaattgaatttaccatatatgcctccgcatttactttacatacgcgtggtgctagttaaatcgttttagttaataaaaaagtccaattagactagactcaagttgtaagtaatttaaatagaaaagagtctgatctaattgaactatctcaagcttaatcgtttttctcaccatttacaagttagttttaatcggttaaatgtgatttgtcgctcgctgtataagctttatgcgcctgatggacttaaacatcgtaaaaatgttgatcagaccaagcttcctgatagttctatcttagcgatgctcatttggcaaactgaaattggaattgaatctcaacgaagattctgtaaattcttcgttggcttatctcattctcgttttaaccgtcgagctcgaatgctcttgcctctaattcgttgtatccgtcagggttggaatcaggaagtaaaggtaggtggagaattattgattatcgacagttttccgattccagtttgtcagcctgttcgcaattatcacgttaagatcttccgtggcatagccgatattggttataaagcgacgaaaaaaatctactattatggcttcaaagtccacgcaatagtgagtgatgatggctatctgcttgactacgcagttactaaggcgtcggtacatgatgcaaaagagacggtagaattgatgatcaatgctcatccaattaaccattatcttttaggagatgaaggctatttaggaaaagacttagcagccaagctaaagcgtatgggatacgtgctttggacaccatatcgtaaaaacatgaggggtgctaaaaagcataatgatcatcagttaatggcaattagaagaacaatcgaaagcgacttttctttgcttagctattacaatgctgagaataatcgagccaggagcttagtaggttttcaacaacggctagaaatagctattttagcttataatatggcatattgtctagaacgatttaactagcaccacgcgtactttacatgcttattttagcatgcaatcttttattgacaacgttttcataaatatttatgatgttcttaaaaagtatagatttttatgaggtgaataaataatggatttagcagcaattgatattggcggtacaacaatcaaaatcgcaacttggaaagacggtaaattacaggataaacatgctgttaatacgccaaaggatttaaatagtttttacgatattttgactgcagaagttaataaaattaaacaaaataccaaaataaaaggtgtcgcaatttctgcaccaggcgctgtaaatcaaaagacaggtattattggtggcactagcgcccttccatacatccataactttaaaatcgttgacgaattaaaaaagcgttttgagttacctgtttctatagaaaatgatgccaactccgctgcgttaggcgaattagcagaaggtgctggcaaaggcagtgacagcatggctttctttgttattggtacaggtattggtggtgccatcattattaatcaaaaagtctggcatggtgctcacctatttggtggtgaattcggctatatgggcattggtacaaaatctgttagtgatctggcatccccagtggcaatggctaaccgctataacgaaagaactggtaaaaaacttgatggtaaaacagtcttcgctttagcagacgaagatgatccagtagccagcgatgagcgtcaaaccttaattcattccctagccttagcaatttacaacgttcagcaaagttttgaccctgacaaaattgtaattggcggtggcatttctaataatccagaattaattccgttattgaatcgcgaaattgactatattcgcaaacaagtcaatccagcaagtattaaacctgaaattgtgctttgcagtttgaagagtaatgcaaacttacgtggcgcagttgcagattttgaacaagcacattaaatttttataattatttaattccattaaaagcccgctatgatgggctttttgttttgtatttataaaaagtatacgcgtggtgctagttaaatcgttctaggcaatatgccatattataagctaaaatggctatttctagccgctgctgaaagccagctaagctccttgctcggttattttcagcgttatagtaactgagcaaagaaaagtcgctttcaattgttcttctaattgccatcagttgatgattattatgttttttagcacctttcatgttttttcgatatggtgtccaaaggacatagcccataccttttaactcggcagctaagtcttttcctaagtagccttcatcgcctaaaagataatggttaattggatgagcattaatcatcaattctactgtttctttggcatcatgcactgatgctttagtgactgcgtagtcaagcaaatagccatcatcgcttactagcgcgtgcaccttgaaaccataataatagactttcttggttgctttatagccaatatcggctatgtcacggaagatcttaacacgataattacgaacaggctgacaaactggaacaggaaaactgtcaataattaaaaattctccagcaacctttacctcttgattccaagcttgacggatgcagcgaattaaaggcaaaagcatcttggctcgacgattaaagcgagaatgagataagccaacaaaaaatttacagaatcttctttgggattcaattccaatttcagtttgccaaatgagcatcgctaagatggagctgtcggaaagctttgtttgatcaatgttttttcgatgcgtaagcttatcaggcgcataaagattatatagtgaacgacaaattacatttaaacgactaaaactaacttgtaaatggtgagagaaacgattaagcttgaggtagttcaattagatcagactcttttctatttaatttacttacaacttgagtctaatccgattggacttttttattaactaaaacgatttaactagcaccacgcgtatttgatatgaattatcagtatcgaataacccctcattaccaaattgcatgacatcagaatcaacttgatcaactgataattgactatcaaaaatacctttaaaaggcgtatctgtttcgattgcgtagtttaaagtgccacctttctgtgcagttttttgtacagtttgttcaggaaatttctttgcactttttgctgcatttgtattgctttgaccacatgctactaaagttaaagcagcaccaataagtagaccagttgaaccaaataatttaattgacttcatagttttttctcttttctgtaacaaaaaaaggtccacatcccaattaggaatgtgaaccttgcttagtaatcaacttaattaattatttttaaacaaaattcgccgcacaccataatttaggatcacaaaataaaccatcattttggtggcggcgtcgtaattctactgttgctgaattttgtgattctaacatgatatgtagctcctttcttaaataattttaatattatgctaatcttattttattgttttgtcaataatgaattttgaattttatcgataatctgattcatcagttttaaaatgtttgtgtgaagggatttcatgagaactacgctctttttataaaaaaattgataagagacaaaagagtaagcagatatagacttctgctcactctttattttattgtaaaaagaaaaagaaccgaatcaaaatgattcggttccaaaagcgtcaaatttgtcaatgtcttaacttaatgatactgtcactaacttaaatcaaacaaaagcaaccagtatagatcttttatctacactggttgctttattaattgatattgcagtatggccttactactgcattgtatttagaattatttgtctttagcttcagtgcttctttcgtactagtcattttaacttaggctaattccactcaatactaatcttgatcgcttttttcaacgtttgatagacagtagatactcttaaaatatctttaacaaatttatcttgatcttcatgagacataggactatcaaatgatattttgatagttatcgtatcaacatctggcattccgtgtgataatctctcggtattcgcttccgcattaatcttaaaattttgaacgtccagatggtgcgccttaataagcaatccagctgaaatagacatacaagaatttaatgccccagttaaatattcaacaggatcagggcctccagttttatcaccattgtcagctataaagcgatatctggcagttgaattttcaatttgccattcagtatcgcttaattcactatttaccacatattttgtcatttttccctccactctacaactattctgccttaagttttcaacctaattatactctatcgtggatctagttcgtatatgttgttttgcaccccgatgagatcacggacattaatagagtagagggagttttataactcgcccctctcattgcaccggacgtacggttccgtatccggcgctacgtttgtgattatttacgagataaataatattctagcggatcgaccaagcctgggcgatccgctttgcttatgcccaatacttttgggctaagcagaaagttaatgacatgacccgtacttcttttataccaacctaagcgcgtattagctactttatgaatatcttcatcactaaaattgcactttagtgccttgttaatccgcattaagttaatgtatattcgttttggtagtttccattgtttaatgattaccacccgtactttatgacgcagccattgactgaacttaattagaaaatatttcatgtcgccaactctaaagtaattgacccagcctctaactacttgatttatcttagtaaagactagtgatagaggctgagcagctgcttttctgcgacagagaagttctctcatcttgtcataaagcttgattttgcggtcatctcctggctttgcttgccagtattcgccacttttccagaaggtaaagccaagaaagttgctcttggttggtcgtacaactttggttttggttgcgttgacctttaggaatagctttctttctagccatgatgaaattgaattcatcacacgtttggctgatttaccgcttttgacaaagatattgcagtcatcggcatagcggacaaagcgcaggcctctttgttccaattctttatccattttatctaaatagatattggatagaattggtgaaagagggccgccttgtggtacacctagtttattaggcttaacccaaccatcttccattactccagctttaagaaaggctcgaattaaatggagggtggttttgtcatttacttgctctctaattattgaaattaatttatcatgatttaccgtgtcaaagtatttctcaatatccaggtcaacaacccattgatagccttcgtttaaatattccaagacttgttcaatagcgtcatgagcactgcgtccaggtctaaagccatagctatgctcactaaaatgaggatcatagatcttcattaatacttgggcaatagcctgctggattactcggtcaacaaccgtgggtattcctaaaggacgtttcttaccattagctttaggaatgtagactctgcgaacagcttgcggacgatacttcatcttcatgatggcgtcctttatttctacttgatgctttttaaaatagctatcaagctcatcaactgttctcctgtctacaccaggcgctcccttattgattttgactctcctgattgcttccttgagattattttgacttaaaatctgttcaattagttccatctcgtgatatctccatttctacttgtaaatttattcagaattgtcccaattgctttcaccatcaaagagttacgttctctttgtgctaggctatcctcttatccggactgtctgaacattgcttatagcgagatatgctcttacaaacattaggcccttcgctccagtttcattacaaaaccttcagcactactacgacctcagctgacttctcgcgattaacctttttcgaccaggcttacgatcgctgatattaaagcttactcggtttcacctgtccacgagatctctcggggtaagacattcatctttaattttccactgccccctggtttaccgtcttggttttacggttgtcctttggactttaacttgtgctgcagtctcatccaccatttggcctgaccaggtttctgtacgtaggctcggaaaactcgctagccacttccttcacccatagcgtcaccgctaacggcttgtggttcgctacacttggcgacaactacccgtgatctagactttcactagactagacaaatgccatgcccgacacacaaccaaaagcagtccatgatttctcatgaactgcttagaaagagatacttctaatattttcgaatttttattgatgttactctgtgacctacatctttataaagaatgatattagccctttccttggttggtacaatatagtcacgtagattaactaaattaactgtccgccaaaccttttttgcataatcaattgattcatctaaaggaatatgagcccaatgataaaagaaattattaggattatctttattaatatctagcaaacatttaaagcgagttaagaaccattcctctaataagttttcactggcatcaatatagatggatagatctatataatcactgataatcttctcttcattttcaggaatttgcaaaatatcgattccttctaaaatcaaaatatctggattggtaatgctacgatatttaccaggaactatgtctgaaagctcatgtgagtatacaggataggaaacttcctctaccccatcacttacttgagaaagaaaatcatttaatagtgatacattgtaactttcaggaaagcctttgcgtgacattaaattcttttgctccagtactttgttgggataaataaagccatcagtcgtcaatgattgaacatctaaatcagagtaaaattgactaataagagtctctattactttagcagtcgttgactttcctgcagcaactgatccagtaattcccaggataaatggctggtttaaatcagcactcttaatgtaatttgtctttaatttagagaacattttcttattttgaacgcaaatcaatatatattgaactaataggatatatacttcttgaagttcattgactgtaacctgtaacttattttgatcaataaaactttttaatagttcataagaaggaagctcaatcttagagtttaatttagtccagtgattacggtcaacagtaataaaattattcatcatttacgctcttttaagtaccaaattaagaggtgtaacaattatagggacaagaattgcattaaatatcgcttctaccaagccgttgaaacctagagcagtgactagaattaccaacaatggagttgactgacaaaaatgccctaagtaacttgttaaggtgcttgaattagacataaacattaaatcggtaagtaaaattacaagaatagtgttcgtcagcgaagcaactgctccactgagcatataccctatcttttgaatatgtgcatccctatctttaaacttctgactaattaatccaggaaagaatcctgctagaacactaggaacaagagagattactggattttggaacaaaagcaagctgaccatatcccctggttgtgtataggccacaactaaacgagtaattccccaaactaatccaaaacccaatccccatttcggtcccattaaagtcccataaacagcaatggttaatggaatagtagtaattgcaggaagactaggaagaattcttacatacccaacattcggaacaaatgtctggataaaaagcaatgcaataaatacagctgtgatcgttaaattggtaatttcttttctagtcttcataatgatacgctccttgccatatgttgatttttcattcttattagagcacgatttacacaagcaggaacagcatctgaaatatcgcctccaaatagcataatttctcttacaatactagaagatatgtatgaacattcagggtttgaaaatagaatcaaagtttctatattggggtccattttcttagtcattaatgctatttgttgttcataaacaaagtcctcattatttctcacatcacgaacaataacatcagcatttaattcatgaaccaaattaacagttaaatcactttgaacaaggctcacggaaacattaggataaacagacacagcgtctttaacaaattgatatctttgttgaggagaaaacataccatttttggaggtattatttgaaacaacaacgactaacttatcaaataattttgaagcacgactaatgatatctaagtgaccattagttattggatcaaagctacctggaaatatagctttcataatgattcttccttaatttttaatcaattgatatctttttatatttagaaaagtatttcaaaaaccaatttttagcgtattctactgttggatcttcagtggaattcatagtatgacaaatcgatatcttccaaggaaattcaggtgtaatttcagcattctttattgcatgatcactataattctttcctattggagcagccacaataccaattaaattcttatcacgttgaactaaatttaaaatcaaatcccatgattgtgtttgaagaaaataattaggtttcagcctatcacctttaaatcttttgttcaattgaaaggtaaccataaaatcatctgtcagagtaacaatcttttctttttctatttcagagaatggaatcggaccagtaaaatcattaaaacgatgttctttattaaaccaaaccctaactgtattttcgtatattaaatcctcataaataccttcaacagtcgctggagaaacaatcacagctagatcaatatcacctaaaatcaacatcctttgtaattcataagctccacgctcgataatttttagttgaatgcctggattttggttaataaaggctattaacgcatcattgaacacggtcgatataataactggtgcaatacctaatctaacagttccgttactattttctgataattcatttagtttcgaaaccatttcaatatattgttcatacacttttttagattccttaactaaagttataccgtaacgtgtcaatccaacgattttaccctttcgccgattaaagatttttacttgttgcttaaattccatatctttaatcgctttactaatagcgggttgagaaatatggaggacttcagcactacgagttaagttaaagtcattatctgctattgtgagcaaataacggatttggttaatatccaactttgcatccccctatgaattaaaacacttaactatttcttatcgtttttgatattcatgactggctcttgaaaaattctcggatccatctcctgcaaattgtcactaataattggcttaaattccatttgatcaagaatatctttttgtaaatcaatgcctggcgcaatttccagtaattcaataccgcctttaactagcttaaatacggctctttcagttacataccaaacttcttgattactgtcatatgcgactttacctgagaaggtaatttgttgaacatgctttacaaatttctttactttaccttcttggataatgtttaacttaccgtccttgatttcttccttaagtccagctgcagtgaacgtaccagtgaagacaatcttaggtgtatattgagtaatatcaacgaaaccaccagtaccggcaatcttaggaccaaattttgaaacatttaagttaccatattggtcagcttcagctaaacctaagtaagttgcgtcaagtccaccaccgttgtagaaatcgaacatgtaaggttcatcaatagtagcttgaggagcaatagctgtaccaaaactaccaccacctaatgaagtgccaccgaatgtacctgcttcaacagtagttacgatattgtcagataatccttcctctttcataaccattgcgcaatacattggatattgaccaataccgaagtttacacaatggtcggtatcaggattgaataagaatgcagctcttctagcaataaccttctttttatcaagaggtaagtccatttgcttaacgtcttttacaatattagacttaataatatctggattgtaaatgtaatcggtagtctgtttagtcatttcaggattatcagtcggaactacataatcaactaaaacgccaggaactctgacggcctttggatcaagactaccagccttaacaacacgcttaacttgaacaattaccttaccaccattgttgtgagctgccatagcaacagcagtaacatccatggttaaaggctcatcatcaaatgtgatattgccgttttcatcagcataagtaccacggaaaattgatacatctggctttggtgtttcataagctaattaatcttttccatgaatcttaattctatttaccaaagtagaattctttgcagcttcatttaaacgaccaccatcattttctgggtcaacgaaagttcctaatccagtatgagttactagaactggacggtgagcagctgcatctctaaacaattgtgaaattgtaccttgtgggaaattaaaggcttcaaaatcattatccgcaaccattggtgcaagctttggcgctaatgacccaagcccaccaactactcgacggagcattcctttttcagcaaagttttcaacggctgagcctttgttatcaccgataccacatccataccaaacatccaaatcctttggatgtccagtttcttggtatctatttttcatcatttcaagaatttcttcagcgacatcagtgccaaggcagccatcaagagctacactagcgttatctgggaccaattctgctgcagttttactgtcaataactttaacagacatagatttatcctcctatgtttaaatctaactaactacgtttctactgaattggaaaccagatgagtttaataatatgtatgagagtatgtttcaaattagtagaattttggaatcatttaattccttgacacttataaggtaccgcttacatctagcattgtgaaatcattaatttttagcattatcataactattggttataacttataataataataaaaaaggcgaaattacattcgcctttatttaatgcttgattataaatattttatgtattaattccacagccataaaatggctttaaattacatgatttcgatgtttttattcaatactttttgagcatcatccattaaatctttaacaatttctgcagcaggcttagattctttaattagaccagcaacttcaccagccataaagaaactcttatcagggtcatcttctcttacaccaacgtatagtcccttgttcaatgctgaattaaattcatctcttgatacgcctgtcttttcaagttcaaacaacttgccagcttcctcattagcaataccacgagtagcaccacccttgatagtagagccaacaacagcagtaccagtatcagtagcatcgatgacagctttacgccagttatcacctactgggctttctttagcaattgaaaagattgtaccacattgtacaccttcagcaccagcaacaaatgcttcaacaacaccacgaccgtcaccgataccgccagcagcgattaatggaatattaattgcgtcagcaatttgtggccataataccattgaagtagtcccaccaatgtgaccgccggcttccataccttcaacgataactgcatcagcacccatttcttccattttcttggcaatcttaacattaggaataaccggcattaccttaattccagcagcttttaaatcagacatatatggttttggtgtgccggcaccagtagtaacaatcgaaactgtcaaatcttttgtgtaaatagttctttctcgtaaattgattttttaatcatttatttaatcaaaataggattctaaggtatcctgaacctgaccaaagcctttatgaattcggtcgaaatagcggtcattgtagctcattgcctggatgccaataaatacatcaagcgactgttcagttggaaattctgccttaggcttagctttacgcttgatgacgttgttaaaggattcaatcatgttggttgaataaattgaagctctgatttgtttgggataattgtagaagaccagcagatcgggctcaatttccctcaaacctttgataacatggctataagctttattccattttgcataaaattcatgcaagacagctgcagcttctttttggcttgtctgttgatgtatctgcttgaattcgttcatgatcttttcgcggtcatccacccggactttagcacagatattgcgcatgacatgaaccaagcagcgttgaaaatgagctttaggataagtcctggccaaggctgttttcatgccaacaacaccatcagaaagaaagagttcaacttgcttcaagcctctggacttcatgttttgaagcatctctgtccagacttcaatgttctcactaggagcaatgcagtaatcaatgacttccttatgtccattaggtttaatgccaatggcaatatatactgcttcacgctcaaacgtttctcggcgcaaaggaaggtatgtcgcatccaaatagacacagaaaaacttgtcgcttagcttgcgcttgtgataagcctcaaccttggggagcatctgcttggaaatatttgatacttgagctggactataatgactgccatacattttctcaatcaagtcagcgatttctctggtagttacgcctttggagtagagcttgataatcgtgctttccaaaacatcagagtgctgcttgtagtcaggcagcgtgtgctgatgaaactgaccgttgcggtctcgaggcacttgcacttcaattggtccaaactgggtatcaaccttgcggaaataagcaccatttctagaattgccagtattccagccatttctggcatagggatcatagcccagaaaggcagtcaattcagcttctagcaagttattaacagcctgttgtagctctttgcgcaataaatcgtttattttgtcttgattgaatagagcttgtgctatatttttggtaaaatcattcatgaaggagttcttctttctgtatgtgtttttttgttcaaaccaatcatacgagaaaggaactcctttttctaatgttttaagaaataaatttaaggaattattcatccttacacaaactattttacagtctcaaattctttacaatttcctgttagaaaatcattattcaagtagataaagaagacattaactataagaaaaggcgtaggttcatatcacaacctatgcctttttcacactataataatatttttactttacgctatacttttctttcccattaacaaaagtctttagaacattaagattactatctagcacattaaaatcagcatccctatctggcaggatacaaccacagttttcatttagactacgtgcaggagtatatgttgccatcttaattgcctcatatggcttacatacttcccaatttactaagtttcttactgctttatccaaagtcaatgtgctgccagctaatttaccattttctaacaatgcaatgtgattcctaactgttactttcataccactaagcacatattcaccatcaggcatcccaccagtacgtaagcaatcagtcattaatacaatatgattaggtccctttaaatcaaacaacatctgcaaaatgatcggctttatatggtgaccatcagctatcatttcatcaaatacatcgtcagctgttaatgcacagccaataatattaggtgtatgctgagataataagttcataccattaaacgtatgattaaacattgtagctcctgcgtcaagggcttttcgtgcttcttcatatgttgcactagtatgtcctaaagaagcaactacgccttttttaacgatatgtctgacaaattgtgggacattttttcgttctggtgctagtgatatctttctcagcatcccatcagaatctctgtaccacttatcaaattcttcaattgaaggatcctccataaactcaggattttctgcaccgccatgttctttagtgaagtatgagccttcaaagtgaatacctaatatctttgcgcctttttcctgccctttatgtgcagcaaacgttttacaaatttcatctaatttctcagatgaagtagttactgtggtcggcatccaacttgttacaccatattgaagaagtttttcagaaattcttgaaatctaaaattgcagcactttttggtttttcatcttcagaataataaaatccaaattgtccattatcttgaatttctaagtatcctcgttcttcaacaccatgatctaaataaaacttctttgcatgaataaaatatgacattttatacctcgctttttctataaaaattcgactttataaccaaaaataaacaagctacgtctgccttttacaaacgtagcttgttttgggagaggggaaatttataactaatcagaagatcatttattcaaaaacactcgtaaatgtcttagcaatttgcaatggtcttgtaattgcaccaccaataacaattccggctggtccaatatcaatcattttctttaattgttctggactgtggatttttccttcagcaataactggcattccagcatcaaccaaagctttaactaaatcataatctggatgatctgaaacaggactttcttcagtgtagcctgacaaagtggtaccaacaaagtcaacaccagcatcataagcattctttgcttcttcaaagttagaagtatcagccattaataaacggtcaggatatttagtcttaatttcatcaataaattctgcaacagttttaccatcatgacgtgggcgcaatgtacaatcaagtgcaattacttcgacatctgttttagctaattcatctacttccttaatagtagcggtaataaatggcttctcaggtggatattctttcttaataataccaatcattggcaggtcaggaactacttccttaatttgcttaatatctctaatggagttagctctcaaaccaactgcacccgcttctttagcggctttagccatcagaggcattatgccaccctcttcggtgtaaagtggctcgccaggtaaagcctgacaagaaataattaatccattatgaactttttgaataaactcttcttttttcatttttatctcctaaaaatttaccttattctaaagcattactactagtgtccggtggattttctgggaacttagtatcaaatagccagttaaatgcggcactatcaacataataaaacattgcttcatgaccatattctggtaacagcatgtgttttttagggctttctatcctattgaaaattgcaaactgcgttgctggaaaacaagtatcatcttcaagtcctgtaaacattaaaactggacactttattctatgagcaaagtttttaacatcgatataagacagagtacgcatcaacttgtcttccgtcttatgaaatggatcataaaacttaaaatacctaaataactcatcatatggcaatcctcgatcacccatttctagtacatgcttgaaatcagaaagaaacgggtattgagtagcacattttaatacgtggatttaatgccgcagcaatcaaagataaagcaccaccttgagatccaccccaagaatatagatgttccttgtctacacgtgacatatccgcgactgtttcaattaacgtgtatacatctagatatacatttttataaaacagatgatctggtccatccactgctccacgaattatgtggcctaaaacggtatttccagcataagtaccgttatcaaccgactgcccttgttggcctctaacatccattgcaacaacgcctacacctatcgcagcatattgcatgaaatcaacccaatcgagagcttgtcccatgtaaccatggaaatagaaaactactggaatatttttttcatgtgctggaaaaatgcatttagcatgaactattccgttatcagtacctttgaagaacaaatcataaaaaacaacgtttttaatattatcgccaaaatttcttttaattaatttaaatggctttgcttctatctttttgatttctttgctccaaaaactatcaaaatcatctggaacttctaatctacctcgatatgactccatatcttttaaggacattgaatctttcattatagtttcacctttttcaactaatccttaaccttctcattgatagttttagcagttaaacctgtgatatcatgtgcatattttggagtaaccaaaccaattaaccaagcaattacgaatgaactaatgaaggctacaattggttgtaccaatgttgcaacacccattacttgacaccaataagtaagagcagcactaattaatacgccccagacagcactaacacggttggctgacttagtaaagataccagcagcaaaaataccagcaactggaacaccaaacaaaccagtaattgaaaggaagatattccaagtttgagatgcattacccatcaacaagtaaatagcaattcctaaactaaatacaccggcgatgacaataatgatacgagctagtgtaacatcattcatcttccatttcttatcaaaatatctttgcttgaagtcagttacgaaacatgaagaaatagcattcaaacttgaagcaatagttgactgagcagcagcgaagatacctgcaataattaaaccggctaaacctgctggaatcttggtaattacaaagtatggaacaatagcactagtgttaaaaccttttggtaaacttcccatcgtgtggtaataacaatacaagaaagtacccataccaaagaatacaaaaatagttacaattgctaaccaaccgtttgtccaaagtgacttggcagttgctttaatacttggagtagtctgataacgctgaacaacatcttgactagcggtatattgatacatactattgaagaattgaccagcaaagattactggaatgaacatagctaaattgttaggattccaatctttagcagataagaatttagaattatctacagcaacttgtgcgatcttcccaggtccaccagtatatacgactgctaaaatacaaattaataaagcaccaccaaggagaaggaaaccttgaataacatctgtccaaataacaccttcaataccgccgaggaatgcataaataatacacattgcaccaactaaaacagcaatcaatattggattaatatttgaaacggaagtaatagccaaaattggtaagtaaataacaatggctactctaccaatgtgataaagcataaatagcaaacttccgagtgaccgcatcactggtccaaaacgcttttccagatattcataagcagtagtaacctgtaattttctgaagaaaggtacataccatttaattaatataggaataattaaataaattgttaacgtcccaatcgaataaccccagtcagttaaaaaagcttgttctggtgttgacatgaacgtgatcgcacttaaagtagtagcccaaatactaaatcctgcagcccaagcaggcaccttaccttcagctttgaagaaagaatctgtacttttacttgcccgtttagtaaagtaagcaccaacgcctaacatcgctagcaaatatgcgattaagacgatcctgttccacataccgaatcctgttttcgacataatttttctccccttttatttaattcatttttacttcttttctttgtgttcgcattatgaaaagtttcaatataataggcgcaatcaatgttgtgattactgtgacaacaatcattgcagtatagtgattttgatctattaattgtgattgaagagctacattagcaacaactagtgccatctctcctcttgaaaccatacctgcaccaacaatatttgcttctgtccaattaagatggaacatctttgctccgataccacaaccaatttgtttacccaagatggctataattattagtaaggcaataaacaataagtccttacccatgccattaaaactaatctgtaagccaatacttacaaagaacacaggaatgaaaactgcataaccaattggctcaatttttgttgataatctgtctgcataattagtttctgaaattgctaaaccagcaaaatatgcgcctaaaacatcgctcattcccattgcaactgctaaggcagctgcaccaaaacaaagaatcatcgcaccagctgtatcactttcagaagcattaagatcactaaaaatatctaagaattttggcacaacatacttaccaataagcaaaacaatgataaagaataataccatcggaatgatcattttaatgattgatgtatggtgaccaccaccgtagatactggagcaaattcctaataaaatgacacagataatatcatcagcaacagcagcaccacagataattgcaccttcacgagtatttaaacgattcatttcttttagaacttgaaccgtaatacttacagatgttgcgcttaaaactaagcccataaatatagatgcttttactgaaaatccaaaagccgtatggcacagaagatatgctgtaccagttggaaaaattactcctaaagtagctacagttaaagctggagcccaatatttaattaataatttcaaatctccttctaggccagcaatgaacatcaaaacgattacacctagttgagaaaaataattaatgaatgtggtgggctgaatccaatttaaaatagctggtccaactaaaatcccgactaataattctccaattacacttggcatttttgccttaactgaaaagtgtgccgcaattttagttaatagcagaatcaaaaatagttgtacaaggtacgtcatcaaagtcacctaccgcatgtctataacagcattgaccttgtcaagttcttgttcaatcttgttatcatcaatgccatattctaggaagattggaatttgaggatcaagtcctaaaatcattggttcccaatctgtagttccttcacctaacatcacagtttttttattcttaatatcctttagatgatagttagtaaccttatcttttaattctttaaaggcaacttcaggcttttcaccaacccagtaccaattacctgcatcataagtgaagccaatattaggatattgatttactgcttcaagacctttaagaacagtacttaaatagcctgtttcattagaaagattttccaatgtcaaatcaacgttagcatcttcaagaagcttcgcagcatcctcaatttccttttggtcaacatctttaacgtcacctacgaaatacttcaaatgcttcaattgatgcttttttgccatttcaacattgtctttcaaactgttattgacatgtccatcaatgaaaaattgttcaggaactgaataatacaatccccaactgttctttttacacaatgctttgattgcttcgagttcgtcgtctttggtgttttctttaaagaattctccacgaacttggatattgtcaattttatctttcaaatttgaaacatcctctaagcaatcaatttgactctctccgctattcaaacgatcaacaaagattgccgcattcactgaaactttcatgacttgcctcttttcttcaataaacgggattaaaaaaaccgtacaattatgctcagcatttgcctcacataagtacggttgaattttgctattagttaatacacctctagcatacacgaaaacaattttattgcaagcgctttctagaaattaattttcaaaaatgctagaaatacctccataaagttgtgcatcattacctaaagaagccatctttaatacggttttacatagatttggcggtaaaatctgattcaatttttcgtccaacaaatcttttaaataatctccctgcttggaaacagcaccaccaataactaatacttctggatcaagaagtaataatacactgcttaagccctctgcaacttgcaaggcccaagcatcaataattttcttttctctaaggcttccttttttggcacgtgcaaaggcttcaataggatcaatacctaagggttctaattctttttgtaatgcaatggttgatgaccgctgttcatagttagttgatgttattggatcaaataatgtatatcctattgaattacccgtttgatgatatccattaaataaatgtccatctgcccaaaatgcaccaccaattcctgttcctaatgcaacacaatagatagtactagcatttttaacacttccagctaatttttcccctaataaagccgcactaacatcattaacgacactgacaggaattttaaatgtccgctctagctctttcttaatgggagtaccttgatagtcagaaatagttggtccagcatacattatgcttccatcgtctccaacaataccggcggtactcacaccaatcccatctaattgatacttctgtatcatctctttggtaactttaataagtgacttcaaaatatgtccgtccttattatgtaatgtatcaactttgcctctatctgaaatctgaagattctcatctacaataccgtatttaatcgtggttccgccaacatcaaaagctaaatatttcttactcatttggttcacgccttcctgtataatcaagttcttatattaagcgctttcatagtatcatttaaaaacaattttctcaaataaaaatttagaaaataattttcgtgctctgtatctcttgatacacctacgctttgttcaatttctgaaaattattttcgcaatttagagttgcgtaaagcgttttcatgttctatactgcaggtgttggttgaatttgccattagttatacagtaattaaaaaaatattattttattttgactaaacggaggtcaaacaaatgcaaaaagtttatgcagccttaatggtttcatttgatgaagatggtaatattgatgaaaaaggtactcgtgaaatcattcgtcacgatatcgatgttgaaggtgttgacgggttatacgttggcggttcaactggtgaaaactttatgcttggcttagaagaaaagaagaagatcttcgaaattgcttgggacgaagttgaccaacaagttgacttgatcgctcaagtgggtggcccaaacttaaaagaagctaaagaattagctaagttcgttactgaattgggttacaagacaatttctgcagttactcctttctactataactttaccttcgacgaaattaagcattactacgatgaaatcgttaaggatgtagatgcaaagttattgatttactcaatttctgcattaacaggtgtttcactttcattggataactttgctaaattattctcaaatccaaagattatcggtgttaagtacactaatgcagacttctacttacttgaaagacttcgtgagcgcttccctgataagcttattctttcaggattcgatgaaatgttgttacctgctttaattgaaggtgtcgatggctgtatcggatcaacctacaacgttaatgcaagaatggttaaagaagaaattgctgcttacaacaacggagacattgctaaggcacaagaattagaacacaagaagaacgacattatcactgcccttcttaataacggtatttacccatcaattaagttagtattgcaaaagatgggcgtacatgctggctacaaccgtgaaccaatggctaaatacactgataaagttattgaaggcgctgacgaaatctacgctaaatattttaataagtaattgcttatttgccaaaaaactacaaatttagcataattaagcggagaaagattacaaaatctttctctgtttttttgatttaacacattaagaaggttttcaatatgacgtttttaactgatttacaaaataggctacccgatttacctcagcaagaaagaaaaattgctttatttatattacaggacccacagtttattcaatcagcaaatataaatcaattagcgtcaacaataaaagttagtaatgctactattactagatttgcacgtagagttaactgctctagttttacagatttaaaagtcaaattggctgctgctgcagcttcttcacaagtaaatactattactaatcaagataactctaaaacgaccgctcaccaagtatatgatttttacaatcgagttctatctgaaacacaaaataaacttgatataaaacaattaaaaaagataatccaactcatcaaatctgcaaagagagtttatttttatggtatcggttcttctggatataccagcttagaagctactcaaagattactaagaatgggtatatctgcgtttgcggaaacagaaagtaataatatgtttatgactagcagtatcatttcaaaagatgacctgattatagctatttcttcaacaggtagcacagattccttggtaagagccattgaactagcaaaaaagaataaagctacagttgtagcattaactagctatgacaatagcccattagctcagcttgctgatattgtagttggtgttcaagatacaaattatattaacgacgctcggtttattaactcacagttttcaataatgtatgtaatagacgtaattactacgctacttttaaagaataataaatatcacgatagaatgactcgaactattacttctgtcttaaatgaaaaatacgatgcatacaacaaatagcctgatatgattatcgtttgttatatctgatttaactatatttcatagatagtattaaccaattaaccttatatacctgatataataattatggtgaagagattaattggataattcataatacttcgcactctagaaaacgtcttctgttattgaaggcgtttttgttttgttcaagtgttttacctgaaatctaactggatatttttaggtattagcacaaaacagaaaaaaagccattgaaaacttgttttttatacaagtaatcaacggctatttttctatccaattctaacgttcttaaaatcgtatggaacgcctgtagggttaaaggaaacgccctttacggtagtctttaataattgtggcttagcaacttgaactaatggaatagttccttggtctttcatcaataccttctcggcttctactaatcttgcccagcgttttactggttgattgccatatacgttttctgattcattcaacagcttgttaaattgattgttattccaaccattgttcaaataacttgatcctttttggaaaacgtccaagaagttgattgggtcgccaaagacagcctgccagtttttaattgtagcttggtaattaccagctgtttgacgtgaaatcaattgagtatatggaattgtttgaacagaaatttgaacacctggaagttgatctagcttactttgaagaaattcagctgtttgctttgaagtatcgtcatcagaaactaacaaggtaattttaattgagttagtcttagattctttatacccttcgcgaagtaattgcttagccttagcaagattatacgatactgcactcttaacgtaagcatcatcttcaaatggtgttcctgtcttaggattattgcccatacctgatggaacgaagcctttagctgggattgaaccgtcttttaagacattatttgctaattgtttgcgattaattgctaaagaaaatgcctgacgtaccttaagattcttgaatgctggaaccttattttcgttaagttccaatcttttaatcgctgaagacaaacgtgcatggtagcctgctttattcttatttgcggcaacttgctcaccagtaagtccagtctcatctgccttacctgcttcaaaaagattatagctagtcgtagttgattcgctaacctgttcattaactttatttaatttaacatttttagcatcccagtaattcttattcttaattaaagtccaagtcttgttgttaccattccatctagtaagcgtgaatgggcctgaagaaactgtgtatttagcttgcgtgccgtataacttgccatatttttgcaccactttttgattttgcgggaaaaataatggccacgacaataaaatcttgaagtaaggcagtggtctagttaattgaattctcaaatgatatttagaaggagcagaaacacccaaggtatccggagacttttggcccttactaattgcttgcgcatttttgatctggtaaagatagaatgccatctgagacttagttactggattaacagtacgcttataagaatatacaaaatccttagcagttaatggatcgccgttagaccattttgcggtttttctaagataaaaatcataagtcttcccgccattagaagttttagccttagtagctagagataattgcggtttattgtttttatcaaggcggtatagtccgtccccggtattaagaagagcttgaaaactggtagtatcagttgccaaagaaggatcctgcgtagaaagctgtgtgatctctgaccaatttaaaacctgcttttttgaaacggtattactatctgattgcttaccacaagcagctaaggttgccgtagttaaagctattaatccgaatgaaacaacttttttatttattctcataaaaatctcctttgctaaaaacggtaaaaagaaaaacgccttactagatcaacttgatctaatagggcgttcagtaacgcggtaccacctatctttatggaaaaccaccttgaattgcgtacggccgtctggcgatacgttaccgctataacgggcggacccagaagctactaaaaacttcatagcttcaagctcaaaggccattttcaaaagtaggtcgatcattatctttcaccaagtaataactctctgtagaaggaccgccaatttactttccttatcatcgctaaataattaataattatgttgattaagataatagtctaaatcattttaaaagtcaaatataattttaatgcttttcattattttactaactattcttcagttagtcttattgactcatttcccaaccttcgcgcatatctttaactaatactgaagcatctaaatcaaggtctacctgttcatattctttttttaattctggatgtctctcaatatctttcttgatgaactcttgaatcttactcatcttatttcaccccatattggccttcatatgataaaagaccgttgatgtcaataactttaccgtagagagtatcatcttctaatgaatactccactgaaccataataacctttatatgataattcttttttcattagattttacctcataagttaatttcgtaaatactaaatcataaatctacagtttcatgatccagtgtttttcattttgtccaaatctacttaagttcaaactccaacctaaccggattatggtctgcatactcaaaatgagtattaatgttatacgcctttgcttgcacgtttttcgacacaataaagccatcacaaatggtcatataattaactttaggatcatatttcatgtctgtagcacgaacagtcgcaacattttcgcgattttgcgccttaatcatagtgaaatctttaggcagcattttttgatcaagaacggatacccaactaggaatttcttcttggtgctcaaaatgagtcatcatgtctttccctaacgcatgattaaagtcgccgccgacaatgacatagttacctcgtcgatattctttttccatcacagaagaaatcagtttcatctgtgccttacgcattttaccgcccttatcataagcagacatatgtgagttaatcattaccaaatcttttccattagttactggaaagcgcataactacaaagcaacgatctaaatcgacaaatttttcaataggcccactagaaacaggatattttcttcttatggcactatccatcttatatttgctcatactcaacaaccctgaacgtacagtgccatgaggattgttcaatggaaccgctaaaaaagcagagtggaaattactagcaaaagttgaatccatttttggaaaatcatcttcaacctttttcacctgattaacgtgaaagctacgagttgaatcagtatcaatttcctggaaaaacatgcagtcagggttctgctttttcattgtttgaatgacaccattagtggaatcaagaactgcttgtttagatattgctgtccctcgatgcccctgcggtttcttgccatccttcaactgacccgaatccataaagaagtcgaaatcatgattataagcaccaaagccaacattataagtcgttgtcttatagctacgcccccgcttttaataactgagactgattgttattaattttcaatctttgattatcaggaattcgataataatgtagagacaaatatatataatagccacagaagataattacacatgccagtatcactgacaacaacgctaatcccactttttttaagactttcatatttactcttttctaactgaatcatttttagctttacttaagatattatagtggtgtaattattaaaaaagaacccacttatagtgagttcttcttattagtcatgaaaatcaattgtagtcatagtaaaatttttaagccgaaaataattaggtacttgttttctcctcttcggcacacttccaaattagactttcgtttctcttaagaatatctagattatttctagtttcagaaggtgtaaagtcgtagttgtaaatttctttataatcaggcaactcatatctggcttctttaaatccataatctgtcggttgttcaaagtggaccaaaagctttttaccaccctttacattatcgtctaccattatttgagaatatgtaattgacaattccccaggaaattctgcatatggatacaacatgtggtcttcctatacaattttataatctgcagtatagttaataggctaattcagatcgacaaatcaaaaatttattaataatatctactggggtgtttttcttaaaagttaaagcgacttctgtatgctcattattagcccactcttctttttctatccaagggacaatatgatcattaaaatatagtgtttctttattcggcattttcaaatcatttagcacttgcattttctagcatccccctaataattgtattcaattctttatcacacgtatttcctatcacagaaaactcagctactacctcatttattttatgttctttaaagtaactatcttctgcatacgaactgattactttcctaagataaccaggatactgtagccttatataatgctcaagtttagaatcaaaaaacatctttgcttctttaatatatatcattatacttacttttatgtactttataaaagcttttaactgcatcccaatgtaatttatatccatattcatgccacaaaattcctctcatatctttagcaacgaaataacttgactttaaatgcgatttaacaatttgatgagtatagatacctttattaacataaataacatctttttcgcgatcgtaagcagctactaccttcaaatattttgaactaactattactaaatcaggaaacatgtatttattgtcatcttgtagtgaatccattattaacttagtagcctttctacttttcttatcatcattttctctccaaactttcaaattattgttgttaatagccaaatgagtatgaacacgacacacttgattttcaatatttttaaaacggtattccttcttttgagctaaaaaatccatataattcctttccttattactcaatagtcagttcattagtctgcccaaacacttttacaattatatcaaacatatgttttgaaaggaagtgccataattttagaaatttattttcacaacaaaaaaggcgatatcacaaagatatcgcctaattctatattttattcacttttaatactgtagatcgctaaattgcttgttggagttttgcttagccaaggcttcgctcttccagtagacagcattagttgttcccttagagttagctgaaacaattacactttgaccattttcagtatgcggtgccaaatatgtactgccttgacctggttcttgacccatattagtaaaactatagaaattaattccattaatagtagcttgtttcatatagcctgaactagttgatgaacctgaatttttagcctttacatccatgctaaaaccagcttcatcattgatcttattagcagttacagtcaaagtatcgatattgccattgccagtatctgcagtgtaccaagtaccttgcaagcttgatggaattacggcactagcagattccttagcaccagctgcattgtcattatcgccttcaagtttaacatctagtttggcatttttagccaagctttgaactagatcaacatcattatttttattaatgtaatcaactacatcttgtaaagttacagtaccaaggtttctttgcttaacaaaaatagtaattttcttttgtgctccatccccgcttaacatgtaacgagcattactgcttttaccggtaccggagacttcataaacatatcctgagtcatcagaagtaatacctgttgcggctttggttctgaacgcaacacctaaattaccatttttggcagcatcaactgcaatttcccaagtgtcgccatacttttgtgcagcatagacagagattgcactagcctgcgtcttatagtccatattctcagcagataattttgctgagttttgactgttacttgattctgaggtgccagttttttctgagttactcttagaaacttgacttgatttttctgactgtgattgtgaattactattaccttgtgtactttggctacatcctgctaaagttaaagcagctgaaattgcaaccaaaacagttaatttacttttcaaaaggaatccccttttctttcaataattctatctctttgcttaatagtattataaaaaatacgatccgccaacttcttacacgattattttacaaaaattatactttttgttcattgcaattattttaatacttctttacaaatattaatttaaagtcttaaattctgcatttcggtgttccttggctatcttggtgctcttccaataagtagccgtataatgacctgtatcaacgctataagttactactgccgtattgccattatctttttggacagaataaagtaagccaaaatcttgggcattcaatgtttgaacatgatagcaatttaatccattaatattttcgatccgagctctagcccactttttcgtttgatctaaggattctgctgctacaccagaattagaaatatgatgaatttcttcaccattaacagtatgatcagtaattactaacttctttcctttatagttgtaccaagtacccaaaagtctcgttggaactaatgctaggccatcgtcacccttaaccccatatttgtcagatgtaacttcagcagccaaagtagtcttagttgctaatttttctacagattttacttgattatgttcatttaaatatgaagctatttcagataaacttgctacacctaaatttttcttctgattataaaaatatacggtttcacttttcattgtataaaaagcattattttcttgaccattgccagttacttcataaatgtagcctctacctttttttatccaattaaaaccagttcgattttttacactaatgctcaaacgatttttcttggcatcactatatgcagtcttccatgcatccccatatttcatcgatccataaattgagattgcactagatttttcagtatctgacatactcttaacaattaatcttttgggagtctgtttctgagtcacaccagatttttcaatagtttggcgattattagtctgcttttgcgattggcaagcagttaaattgatcattgcagctatcaaacaaaatgctactaatgtcttatttctcattccatcgactccaatacattctcattaacacaaaagtatccctaaactaattagggataccagtccagtcattattacaattatatagcagtttgctcttctttgaagagaatattttttgatttttggtaaaagtttatcctactagatttaaaaacttatccataagttcacttatctaatcgtaattagactaattacgattagatatgcttttgaaaaatctatactttacaaaaaaatctcgtggcctcaatcaccacgagattttccaattacttatttatttttaccagttcatgtaacgttgacgttcccaatctgaaactgattgtgagtacttagaccattctaattcctttgattcaatgaagctgtgcattaagtgatcacctaatgagctcttaattaaatcatctttcttgaaggccttaattgcgttgtgaagagtagttggtaatggcttaataccatgttctgctctttcttcttcagtcatttcaaagatgttttcttcaactggcttcattggcatcttttgttctttaataccattcaaaccagcagttaaacatgcagcaagtaacaagtatgggttagcagttggatcagctgaacgcatttccaaacgagtattgatttcaccagcacttggaatacgtacaagtggtgaacggttcttagcagcccaagcaatgtaaactggagcttcaaaacctggaattaaacgcttgtatgagttaacggttgggttaccaattgcagtaatggcacgagcatgttccaaaataccattcaagaagtaaagagcagtatttgaaaggtggaattcgccatccttgtcataaaagacgttcttgccattcttaaataatgacatgttgttgtgcatcccgttaccagcttgaccttgaacaggcttagccataaagcttgcaaacaaaccgtgctttctagcaattgcacgcgttaccatcttaaaggtttggcatctgtcagcagtagtcaaagcatcatcgaatctaaagtcgatttcttgttgaccatcacctacttcgtggtgagctgcttcaacttcaaagcccatgccctcaagagtttcaacgatttcacgacggcatcttgcaccttcatcgtctgaagtcatgtcaaagtatgaagcatgatctggaacttcagtagtccaattgccatcttcgtctaacttgaaaagatggaattccatttcaaaaccaatatcaaaagtgtcgaatccagcttcattcatttcaccaagaacacgcttcaagttatttcttggatcaccagcaaatggcttgccatcagtggtgtgaactgaacaaatcaaacgaccaatcttaccaccgtgttcgtcaccccatggcaatactgtccaagttgagaagtctggatataaaaccatgtcactttcttcaagacgaacaaagccatcaattgaagaaccatcaaagcgaatgtcattagtcaaaactttatctaattgactcttaggtacttcaacggccttttcagtaccgttaatatcagtgaaggccaagcgtaaaaatctaacgtccttgtcttcaacttcttgcttaatttcttctgcagtatattgtttactcatagttaattcacctataaaaacaaaaaatattaaattggtatggtcctatgatttattcttatctcctagaactgtttaatacaatagcagaccaatttaaaaaagtcaaattggtctagtgattatttttaaattttattttttgttaaaaaatgtatcacgaaccgcgttaataatagctactttgtcatgcgcataagtcaagccaccctgcatataaaccgcataaggtggtctaattggaccatccgctgaaaattcaatagttgaacccgaaacaaaattaccagcagccataataatcttatcttcgtagccctccatatgcacagcttcaggcgttacaaaggaatcaatcggtgagtttttctgtacttcttgcacaaatttaaccatcttatcaggatcaccaaaaataattgtctcaataatatcgcttcgcttctcatcccaagctggggtaacattcaagcccattttggcaaacaaagcagccgcaaaaatcattcccttttcagccataccggtaacattaggagccaagaaaaagccttcataaaagtcatgcaaattgccaatagtggcgccctcatcggtgcagcctggagcagtcaatgcaagttttgcattttcaaccaggtcttttttaccaacaatataaccaccggtcttagctagaccaccaccagcattcttaatcagcgatcctgccattaagtcagcaccatactcagttggctcatgtttttccgaaaattcgccataacaattgtcaataaagacaatactcttagggctgacccgtttaacaaaggcaatcatgtccttaatctgatcaactgtaaaggtctttctggtggagtagccacgtgaacgttgaatggcaacgatcttaggctgatcacgtttaagaaccttttcagcctcgtcataatcaactaacccatcatcggttaacggcacatatgaaaaatgcacgccgcgctcgactaaagtaccacgcttatcatcagtcatcactttttgcaaagtatcgtaaggctgtccagttaaataagttagcgtatcgccgtatttcaaattgcctgctagagctacaaacaaggtgtgcgtacctgaaacaaattgaggccgaactaccgcatcttcagtttgaaaaacttgagcatagatcttatctagcttatctcttcccatatcatcgtcgccatagccattagccccatttaaatcggcttcagcgacatcattagcttggtaagccgccaaaactttagccgtattatagacaatttgatcttcaatctcaaccagtttaggtgcgatctgttgatcaacttctttaacaattttttgtaatttttctggcaaattattcatttttccattccttgactttcttcaatatcttttgttcgcaacccgaatcatctaacggatcaaaccaaactactggtaatttatttctaaaataagtcaattgacgtttagcatagcggcgcgaagctgtctttaaatcttcaatgcaatgctctagcgtctcttgcccttcaaaataagggaaaaattccttatacgcaattgcttgcaagacctgatactctcgtgctcgattttgataaataaattttgcttcatcgagcatcccttgctccatcatcttatcaacacgcaaattaatcctgcgatatatctcttgacggtcagaattcaagccaataatcaagtaatcataacgcggctcgatctgcttttgttgctctgaaaactttttgcctgtacgctcaatcacagtcaatgctcgcatagttctgcgactattggctactggtattttttctgccgccttaggatcttgctcattcaagacctgccacaatttttctgcgcctttttccttgaggtagttttcccacttttgcgaaacgctacgctcttctggagttttctcgcctagctgcatcttattcaataaagcattaacataaaaacctgtcccgcctgcaataattggtaacttacctttttggctaatctcttcaatcgcttttgttgcttgatccacaaaatctttaactgaatactcgtcaaaaacggattgcgtatcaactaagtagtgtttcacttgcgcttgttcttctgcagttgcctttgcagttcccactgccacttcttggtaaacttgcatggaatcgccagaaataatctcgccgttcaaccttttagctaaatcaatcgccaagtttgtcttaccgatagctgttggtcctacaatcgctagtacctttttcatcaccatcacctttcttaattttgatacaaaaaaagagcgcattagagttaccccctccaaatgcgtcttcttttcatttaatattttgacttcttagttcgaccatcccaagcttcaaagccatctttaagccaatggatagaaacaaaaccctttttctttaaaaaacgggcagctctcaaagtaatggtctttgaatctgagtaaagataaactggcaagtcgcttctaagctcagtatattgatacttaagcatggtatatggcaagttgcgagcgccatcaatatgcttgcgtttaaacggttctttttcacgcagatcaataatttgtgccttacgcatgccttctttaaattcttcattagtcaattcgccaccgattgatttagcttgaattttattccaagcccagataccaaccatgactaaaataatgactaataaaactaaatctaagacaattaaaaaactcgacataaactaaatctgccctttcataaaaaacttacatctattatgataccgctaaactaatttactggctatcatttttcggatctttgagcgcctttttttgttcatttttgacttcaattcgatgttctcgactcaaaatcatcttggcaatcaaataatcatgttggtcaatcagaccggcacgattgatattatcgagctctaaagccattaattcaatatcccaaattcttttgcccacatgaaccaaaattccgtatttttctaataattgttgtacatcgtagagagttttcattagaaattaattatcattcctgttctaaccgtccaaacaacatatacgactaacactgcagcagccaatacgcgccacttaggattgtaggtcttcattacacgatcgcccaagataatcgctaataagaagccagcaattaagccaccaatatgaccccagatatcaattccaggcacaaaaatatcaagcgctaagttaatcaaagctaagacaaaggcttgtcgacctaaaaaagcaatcattggattatgcaaattgcgcaagccaatggcagtcattgccccaaacaaaccaaataaagctgttgaggcaccagcacttaagccgcgatcagcactgaaagccaagctcattagattgccgccgaccccagctaaaagataagtcactaaaaagcgcacatgtcccattaatggctccatatactgccccatgtagtaaataataatggcattagaaaccaaatgcatgatgccaatatgcaaaaactgggccataaataggcgccaccattggtgtccagccaccaccgcaaaattattcatggctcccattttcatcaagacattggtattctctgagccacctaaaaacacttcaactaaaaagactattaataaaactactaaaattcctaaagtcacaaatgattgtgagaggttaatttttcgtttagtattcatttaatccccccttatcttcgtcattgtgactattttaataaattttatcaggagtaacaattgtttgaaccggaatatcggttttttcgataggccaaatgctagtatcgaacgtcatcttgctattggctaaagcaacagttttaggatcatgcttagccaaaaagcgatcataataacctccaccaaagccaagtcgaatatgcgaatctaaggcaaaggctaaacctggcacaatgactaaatccaaatcattattgattttcgcatcttcatcggcgacttcttccacaccgaatttagattttaccaatttgctcatatacgtatagcgtaaaaagtctaaagtatgattttgatcgcttcgtgcctttgccagataaacttcttttcctttatcccacaaacgagcaattaattcagaagtatctacttctagtggtaaagaagcagttaccccaatcgtctgacttcttctaattagatctgtcgacattaatttctctaataaaatcgcatcttctgctcttttttctttagtattggcaaattcttttaatttactgatttgttcttttcttaattctgatttttccatctttttgtccaaaaaacaaaaaatagcaggcacgtagcctgctatcttggtttattacttagtttcacggtgaagtgttgcgcgtctttcaactgggcaatacttctttaaagataaacgttccggatgcttacgcttgtttttcttagataagtaacttctatcgccacattcggtgcattctaaaatgatgttatctgccatttttttcaccacctacacttttattctgactgtactagaatagcatttttcaagctgtttgaccagtattattctttattttgttgaatgaagtttgaaataatcttgtaccattgctttggcaacttgcaatgtgtatgttccttcaccatcagggtctaatcctgggaaaacaaccgccactgctaattttggatttttcgatggagcatagccaataaaggttgcgttaatcaattcgatattgtgctttctattagggtgttcagcatcatagtagaaagtttgtgcagtaccggtcttaccaaaaattgatggcttaacattcttcaatgggtgagcagttccccaaccattcgtaccgtgaacaacacgatagaaccctgtttgaaccacattaagttccgcaagcgtccaaggaattacttgttggacatttggcttcttattgtagctaatgtaaatcttcttaccatctttgctagttttaccaactgattgcacaatataaggttgcaatctcttaccaccattagcaatagttgacacatattgggctaattgaattggtgtataagcatcatagttaccataagctaggtcaagtacagaaccggaaagaatattacccttgtcattaaatgacttaccttcaattcctgacacttcaccaggtaggtcaacgcctgtcttttgacctaagccaaacatagcaaaattacgccgtaaaatgtcaaaggcatcgtttggcatatgaatgtagctcttcggtacataactagccttaacccatttcattgctaagtacatcatgtaaatattactggagacttccaacgctgtttcagcatccaatgaactgaaagtaccaactggataaactgactttttaactggtgaacctggcaaataaattgccgtatcaggcaaagtattgttttcgggagtaataaccttattaattaatccaccaccaacagtagcccccttaacaactgatcccataacaaaggattggttaattacacctaaagcattatcagtcgttttaccagtgttcgtgtttcgattaatcccggctacagctagcaaagcaccagtctgaggattcatcgccacggcataggcaccattagagtatcttgctgcaccgttaccaacagctgtactgtaaacccgtttcaaagtagcctgtacttgcttttgatacttagcgtcaatcgttaacattaagctggcaccggcttgaccattataaacagtcttagtctgctggatattaccattcgatttagtaataacctggttagtcgacttagttcccttcaaaagtggctcatattctttttcaagataggaagtacctacccggtcgttacgtgagtaaccatttcttaagtagtactgcaagctatcacttggtaaaccagatttttcagttgaaaccgaaccaatgatactttgaatagatgaaccatttggataagatctttgccagtcagttccgatacccacaccaggaagctctgataagtgctcacctacttgggcaatttcacgatcggttaagcctttattcttgatataaatcgtggataaagtataagcccctgaaatcttattaaagattaaagccgctgttttttgccgagtggttagttgaggattcattttttcaacataagccaattccgcttgatagatttcagctgaagtcttcttattgccatcagcatcaatcttggctgacttcggcaaagcattagatatcttagtattattatcttcattagctaaataataatctgctgccatttgctttgtcggcttttcatcgctaatcttgatataattactcaaggcattagatatcttgtaaatatctgctgttgtagtcgaggcactcttagtataagtaatagcattggttgctttattacctactaaaacgcgtcccttagcgtcatacatgacaccacgtggcacttgatgcgaaacaacagttgaatcagttttttgcacttctgccttgaaacgtgaaccataaactagttgcaaataagccaattgcccaattaacatggcaaagaggactaaaattacccctagaatgattcgcattctaattggagttgaggaatgcttgtttgagccagtcccactattttttctaaaataattcacgtaaatcacctttattaaaactagatgtattttaacaaaaagtaaacatcaattctacaattcataagggagcttatataatttttaatgatgcttaaatttcttaactcacgacacattgcaattaatcgtaaaaatatttttttctggcttagttttttgctaccggctttgattttcttgagttactttttctacagcaaaaatggagtgctcactgtcgacttaggtcaacaatatgttgattttcttgccttcttcaggcgaaatttgttctcccatcccttgcgcttaatctattccttttctaatggtttaggcggttcaatgctagcaactgatgcctattatctctgcagtcctttcaatctactcttatttttatttccgcaacattttttgccacaagcaattttaattattatcgcattaaaaattggagcggcgggactatcttcctactactattggaagcaaaaaatcactaatcacttttacgctttagcggctagttcggcttatgccctttcaggctacgttattggcaatcactataatctgatgtggcttgattctgtgattttgcttcctttattgattaatgccatcgaccgcttgctggcccaacgaaaaaataagttaattttaattacctttttgctttggttcactaatttttataccggatttatggcattagcctttggtttgctttatctgttaagcaaaattttcttcatcaataagcaggagcgcctacgccttaactggatttatttaagaaaaagtatcgctggttcatttttagatgcctttatgctcttccccgttctgattgaaatgttgcaaggcaaggctagttctactgcctcatggaatttgggctggcagttttctccagttgaacagctgactaagttagccgaaggggcctataactttcatgaaatgcaggaagggatgcccaacatttatctgacaatgcctttcttgttgctgacaattttatattttttaagcaaaaagattaactggcagcgtaaattagcaaacggaattttactcattttcttaattgcttctcttttttggacaccactggttttactctggcatttaggccaattccctgtctggtatcctggtcgtttcagctttgtgttgatcttttttgcgctaaatctaggcgttattgcattagaacaaaaagaacgtatagcttattggcagaccggacttctgactctattttctttaggtttaattgtttatatagtatttaatgcctcacattttgactttctaactgaagatgcgcagattgccacgggagcttttctagccctcggaatcttgtttattggctttatttatcatcaacacagttttgccgcgccatttttttatttagttatcgagcttgagttaatcgtcaacctagtactatctctaggcaatttagcttatcaaaaaaatagcgattatcagaactttaccactaatgtcagccaagcagtacaatacgcaaatcaacatgattctggattttaccgaactgaaaagactttctatcgttctgatgatgatccttttagcgctggttattacggtttaagtaattttaattcgatttctgatcaaaaagtactcaacctgatcaacaatcttggatttctaaacaatagtaattcctacactaattttggcggaactactttgacagatgatttacttggaatcaaatattatcttttgcccaatgatgaaatcacaacgatcaagtctggtaagcaaatgaagtatgacaattccaaccaccgcgttgatgccagcgattatcatttgcaaaaacgcttttcccaactatatctagtgaaaaataatgccgctttgcccctactctttttaacatcacaaaaaacgcaaaaaatcaattttaactctctagatattactagtaatcaaaccaaattctttcaagcagttacaggggcaaaagtgcagctgtttaagcagatcaattggcctaaagcaaaattaattaatgtaactagtatgaaaaacgatcaactacaatataatcgtaaaaacaataagcaaatcgcacgcatcattttcaatttcaaaccacagactgatgattcttactacattgaaatgcccggtgagatcgatgataatgccatttcaatgacagttaatggtgctaatattaatctggcagtacgtgatcaaaatgcccgtctcattaatctaggtagccaccagcgtggtcaacggttgcaagttacttttgaactaaaaaaagataaactagaccttagtggcattcacttctggcgcttaaacacacaaaagctcgagcagattatacatcgttttaagcaaaaacaaccaaactttaaacaaacatctgctttgatcatcaaatctaatcatttcacaacgaagaagatgatgacattggcgtcaactattcctaataacattaactggttagttttagataatggcaaaataattaacaagaataaaaccttgttcatgaatgcttttttaaacttcaagttgaatccaggaaaacatcaaattacattaatttatgtaccatgggttcttctactggggatgttggttagcttaattagtttaacaattttattaatttgcaagaaaaaagccactgttagcgctaacagcaaaacttttactagacctactgtataaaaatataatacaatgtatacgttatcattcggataaattaatatagaaagaagatttacaacatggctcttaaataccaaattggtgttgatgcaggtggtacccactcaactgcaatcgcatatgacgaaactggcaaggaaatcggtcgtgcagaaggcggcccaggccaaattaacgctgactacgaaggcggaattaagaatatctctgacactatcaacgaattgatcgacaaggttgatggtgactgcatgcgcgttcttgttggtattgccggtctttcagttgtcggtaatgctccagaagttgccgcaactatttcatcaagaattaacaacttacctactcgtgctattactgattcacttttagcactttacgctggtcttgaaggtgatgacggtgccttagtaattgccggtactggctcagtttacaacggtttacaaaacggccacttaatcgcagttggtggctacggcaacatcttaggtgatgaaggctcaggttacgcaattgctcgttcagcaatgcaatctgctcttcttagctgggacaagcgtgaagacaacgctttgattcaaatgtttactaaattatttggcgttgaacacatggatgaatgtaacgctaaattctacaagatgtctaacccagaagttgcaggaatggctgttcacgttgcacaacttgctgatgaaggcagcgatgatgcaatcaaagttattaagaaacaagctcatctgttagcccgtgacatcatcatcggtcttgaccgttacgaagatcctaagccaatgaagattgctttaaccggttcagttttagctaacaacgaaatgcttagaggattggtagaagatgaagttaagaacaagtaccctgacgctatcttctcaatctccaacggtgaaaacgctcgtgccgtattgttcgacaagagtaaggactaccgttacttcactaaccacgaagaccgctaaattatcttttctgaatagttacaaaaagctcgaagttactacaatttgtagaagcttcgagctttgtttatgtttaaatttctgctggtgtattacgattaaagatataaatgtcacttttagttttttcccctagtattcataataagactacctataatcttttaaaattcttttaaaagcaaacgctaaaaattgatattttgtatttatagtatatagtactatatagataaagtaatacgttttgtgaatagaggttgtactatggctcaaattagtgtaaaaatcgatgataaattaaaaaaagaagctcaagatattcttgcttcatatggggttgacatatcaacaggaattagaatgtatttcaaagctattgttagaagtaatggcattcctttagaactaagacccatgacagaactagatgaagcgaactatgaagctgataatcacatttatcatggaagttatagctcttttgaagaatacaaaaaggccatgcggaaataatcatgcaagttaatcctaccaagcgctactaccgcgcttacaagagatatgaaagaaaacattatccaatggattatgttgatgattgtgttgaagcaatattaaccaatgacaaagaatttctagccaaacataaagatcaccctgtaggaaaaaatcgcaaaatgcacgttaatcgtcaatataatgacgattggctattgtactaccggattgataaagaaacacatgaactaatcctagttttggttgcattaggaacacatgatgaactagatcgatttgccaatatgtaatagcatgcgttgtattgaacaaaaacagattaatgcagagctcgaagttactacaatttgtagaagtttcgagctttattttgttccaatcacgctaatgatgttaataataatttttgcaactgtaacttagctgcatcttggttagcctgttctggttgctcatgattcaattgacaattctcaagataatcatcaatacccgctttgaaatctttcttcaactctgccagagaatttccttcataagaaataaaagtattttctagacctaagacttcgccaaataaagtatcattttcaacttcgataagtaccttggtaacctttataagttagtaggctcatagtcttatacctgccattcttaatccattcttcaacgttcttaattgatattgtttaagcatatttcgaggatgtggtttgtgtaattaaagattattcacctctcttatatattccatcactgtacaaaatttggaattcaaaatttaggcttgtctcccatcatttattacgcaaaaaatgtctaaattttttgaaaaaagttaatttttcaaatcaaaacaaaagaatcattacatgaactacatttttgatagcgaatacaatatttttcgcttcaaatacatagaatttctttcctttttaaaaaaattctttaaagaggctgtttccccttgtaaatacgcggattactgttaaaataagtaatcgtagtttatattaaaagaggtatttttcatggaaactatttctaagaaacaattagtagatcaaatcgctgcaaagactgatgctactaagacagacattaacactattttggacgcttacatcgacgttgttaagagcaatgttgctgaaggcaacaaggtacaattagttggcttcggtgccttcgaacttcgtcaccgtgctgctcgtaagggtcgtaacccacaaactggtaaggaaattgaaattgctgcatcaaacgttccagcattcaagccaggtaagagcttcaaggatgaagttaacaagtaataatttattattacaaaaaagaccgcgagttttctcgtggtcttttattttgcctcagaacctgccattaacaagacttttccctgctcagtttcgatcatctcgcaatctatgccaaagttttgcctaatcgtctgcgccgtaattacctcttctggcctgccctgcttttgaatcctgccttggttgagcaaaattacctgattactatattgcaaagcctgattcaaatcgtgcaaaatcatgcaaatcgtcaaattctgctttcgattcaattttttcactaaatccaaaaagcgatactgaaaatgcaaatccaagtatgttgttggttcatctagaaaaagatattccggctcttgcgccagtgctgtagcaagccacacacgctgctgctgaccgccagataattgcgctataaacttatctgccaaatcagcaatctctagctcctgcataatctgttgaaggcgagcagatccattttcttcatcccccatcaaggaatgatacggcagacgccccattttaaccagttccttgacagttatctgatcatacaattgattctgctggtggacaattgctacctttttggcaaaatccttcgcagctagctgccagatatcttgcccatctagcgtaattgtccccgcagacggccttattgcccgtgtaagcaagcgaaacaaggttgacttgccagatccattaggaccaattaaagtcgtaatctggtgctcctgcaggctcagagagaattgattaaataattgttttgacccatatgaaaaatcaatctgcgacgctttaagcatttttctgcctcttccataaaattaaaatcataactggaccaccaacaatagccaaaataatattagccgcaatctcattcggtgctgtaatcacccggccgatggtgtcaacgaacaataaaaaccaagctccagcaaaaatcgaaaatggaatgattttttgataatcatatcccaaaagcaaacgagcaacctgtggcacaataattccgataaaagctaaaacaccaatgcaagccgttgttgttgcggccaaaaccactgcaattagcatcaagactaaacgcagggttttagcagaaacacctaaagacgtcagctcttcatcattgaccttcaagtaattagcccaattcataaaacaaatcgcgaaaatcagccctactacgccaataatcaataaatacatcgtcgatccccaactacttgtggccaggctgctgccactattttgactattagtgaaaacttcctgcatccccgtgaacactgcattcaatgccactccgatgataattaactgataaggcgtcatctttttttggaataataaaagaagcccaaacgctagcagtccgccaataatcgcgaaaataattttaccaaagaaaatttctggcaaaataataaccgctagcaattgacataaactggctgcactagagatccccataattccaggttctgcaatcggattgcgcaaagttgcctgaaaaaaggcaccactaacagagaggctagctcctgctactagtgccgaaataatccgcgggacacggatattaaacaaaatattcaattggctgttagtcatcttttgcattgaaaaattgcttgctccgtgagttaatgcaaagaaaatcgtactgattaacagaactgctaaaatcaagtttatccaaattacctttttcttcattttgatcactttccagggtacaaccagttgcttaatttattcaatgcttgagaaacattcatgttagctgaagcattaaagtctggttgctgtaggtcataaactctgcctgtctttacggctttcatcgtcttccaaacagaatttttcttaaactcttgcttaaattgtggcaaagttacatttggtaaagcatgttctaatcgcaaaatgacatctggatttttagtagctagcgagtcattacttggtgacaaataaatctgactatcagagtgatagatattttccccaccagctattctgaccaaatcacctaaatatgatcgattagttagaatcatgtaattagcgccaggcaagcccatcaagatcaatactctaggcttacgaccgtgaacacgtgctttagcctttttaacggcttttttgattaagccaatctgataatcagcctgtctctgccggtaatactgcttgcctaatgaactcagtgtagcttcaaggtcagctactgaatccagcttcaaatatgtaactttaacgccttgttctttaaatgattgatcatactgatcttttaaagttgagactgcatagacacgagtgggattcaaagaagcaatcttttcaacacttggcttcattggactcccaatcttgggcaccttttgatagcgtgctggtaacttagcctgcgtctttggaacccctgctaaattaacgttcaatttatcaaaaatttcagtaatcgctgcacttgtggcaacaatcttttcattattggcaactttttgatcaatcaatcgtttagcaccaattgccactccgacgattgctactaaaaatataattaaaccaataattaatcctttacgttttttcatttactttttctttccttggcatttacgacaatcaaaacagcaacgccaattaaaattaacgaactaagcactccagccaaaataacataataaaaatttcgctgcctttgttgattagcacgttgattgcgtgcattctgcgctatttgcctgttagctattgccgcttgcttcttttgtgccaattgctccttaggcttaacactcttgtttttcacctgtggcgcgctgcgttttatcgcactttctgcatgacttgctcgctcttttttatttgttaacttaggcaactgtgtagtgtcaaaagcaaaagtaatattgtgtgttgcttggtaaacatgtggcacatctattttaatttgactagaaatatcacgttttaaattattagtgcgaaaactatagcgataatcatagtcactgccatgccgcgtttttactacgtttagcggtgcttgtccatcaatcgttaacacctgaaccggatagggacttagatctttcttagtgcgaatcgtcatcgttaccaggtactgattgtcgtctaccacaacctgagcaggacgcgcatagtagccatcagccatcgaggtctgatgcgtgccatacttgtaagtgcgataactcacgctttgtgcactaacagtcacaccaaaaataaacaaacaagttagcaacaagaaaggaaaagagataattttagctatatttttcattatttctttctcttcaaaattttatttcttaagtaaaaggccaaaccaataattgcagcatcaaatgctaaaaagcctgcgatcacaggcaaaaatggatattccaccgctgcaatcgttgccatctttttcttcttgggggttgtctttgccgaaggctttacgctagagtttgaagaagcctgctgctttttaactggctttgactgcggttgagcgctacttgtagcattttttgcatctttactactgtcgtcattagctgcagtaatagcatcactagtactacttgaatcagtgctactatttgcttcggttaatgccttgcttacagtcgaactgtgcgccacattttttacaccaaaagcaaaccagaccttaaacaaacgatcatgaatattggcaattggtacgctcaagcgcagactcccctgagcctgcttcttcaactgatttagcgacttgaagtgtacctgataagtccagatatccttgccagcttgtttggtaaaacgcaggtttgaaattgaaccaattcccagtgaaaccggctgaaatttggtcaccatcccatgctttacctcaacttttaaggtcataacatagtcctgctttactttttcaatcctggcatgatgagtgtaaaaattatttgctgcagaaacgccactgcgatccgccttatagaccgcataattgatattttgaacctttttatccgcgctgaccgtgtgtacttttcttactaacttttttgacgctctttttactagccttcttttgcttcttgtcggtctttttcttgctagtagttaaaccgctaaccttgtcatacttcacccaagcttgttcggtcatcttaccaccaaagtcaatagtgacttgcatcttgacccaaccattatttttgaaagcttttcctgcaaaaacaaagtcaaaactagatttgtcggcggaaacattttcctttttaccgctaacgccattaatcttgagggattttacaatcttatttacgttttgccccttgcccattggactatttttaccatcgacatggattgtcatcttagtcacatgcttttgactaactgttaattgcaccttatctcccacaaaaccttgagccattgacttagcatggctgcggtgatttttactgtatttgtaaaccgtcattcccactgtcttttgactttgttcagcggccattacaaccggattattttgcataaatgccactccaggtgccattaaagtcattgcgaccgaactacttgcgattaacttaagtaactttttattcattctaatatccttctttttactattagtcttttctattataaagttcttaaaataactatgcaatcggtttcaaggtgatattttattcagtttattatgctcataaaaaataaaataacaaaaaaatatattgatttataacatttatttgattataatgtaagcgatacctaaaattcgtgggaggaaacttttatgaaaaaaaatactaaaatcattttaacatcacttgctttactcgcaagcgctagtgttttggcaccatcagctgtagtgtctgcagctgatcagcctgctactaatgttgctgcaactactgctactagtcaaaacagcgacttgcaaactatcactatgactattaccaaaactggcagcactaccccatcagaagctgctatgttcttgggcaactctgctcaagttaatgttaaagacggtaaagttaccgaagtaattattcacgttgatggctctaaagcaccaatgaccaaaggtcaagacatgtctaagatggttgctagcctaacattgaatggtgtagccggcaagcaagaaaatgttgctaaagacggctcatcccttgactatgttttctcagcagatgcttataaagaaggcgctggcagcttagaattcggtcttaacgttatgggcaagaccatgaacgaaaaggctgatattactttaggtaaggtcgctgaagacactgctaataaagatgccaatactacatctgacaagactcaaactgatgccgctgctgctaaaaagacagctgccaagaaagctaaggccgttaagcggactctgaagcacaatgcttatgtctacaagaagaacggcaagcgtgctaataagaaagttttgaagaaaggtcaccgcgttaacacttatggtcgcgcaattaaattacacggcaagactttctatcgtatttctaagaacacttacgttaaaaaagctaacttttaactaaaaatttatttcaagaaaataaaaagacgggcattggctcgtcttttttgtttggattgttatttgagagaaaatttctatttaagcaaaaatatccttaaaatcagctaccacgtctttattctttctgccaggaataacagcgtaaatcacagtggagatgcttgtcggagtatcaaaggcctcctgccacatttttgcgacttcttttgcgttaaagccaaaaacgcctgcaccccagcctttgaccacttgatttatcttagtaaagactaatgatagaggttgagcaactgctttatggcgactcaacaattctctaatcttgtcataaagcttggctttacggtcgtctcccggccttgcttgccagttttcgcccgttttccagaaggtaaagcctaggaaattgctcttcgttggtctaactactttagttttagtagtgttaacttttaagaacagttttctttctagccatgatgtaattgacttcatcacgcgcttagccgacttaccactcttgacgaagatattgcagtcatcgacatagcgaacaaagcgcaagcctctttgttccaattccttgtccattttatctaaatagatattggataggattggcgagagcggtccaccttgcggtacgccaagctttcattggactagatgaatgtcatgcccgacacacttcaaaaagccacgctgttgagcgtggctttatatattttttacgcgtggtgctagttaaatcgttttagttaataaaaaagtccaatcttgttagactcgacttgtaaatagtaataatagaaaagagtctgatctgattgaactgccttaagcttaagcgttttagccaccatttacaagttagttttaaagatttagtgataatttgtcggcactggtatcgtttgtatgcaccggctgagtttactcatcggcgaaatattgatcaaattaaaactacggacagtctgattttggctttacttatctggcaagctaagacaggaattgaatcacaaagaagattctgtgaatgtttcaattgtttatcacactcacgttttaatcggcgttcacgtcagctattgcaattgatttatcagatacggcaagaaatgaataaaaaggttgacctgaatggacagttcttgatcattgacagctttccggtacctgtttgccaaccaattcgaaactatcgtgctaaaatttttcgcggttatgccaacattggttataaggccaccaagaaaatttacttctatggtttcaaagttcatgccattgttagcgatgacggttacattcttgattatgtcgtaacaaaggcatcagttcatgatgccagggagacagttgaactgatagaaaatacccatccatctaattactatcttcttggcgacgaaggctatttaggcaaagaactgcatcaacagctaaaacaaatgggttacgaactttggacaccatatcgtaaaaatatgacaggagctaaaaagcacaatgatcatcaattgatggctattcgcagaacaattgaaagcgacttttcgcttctgacctattacaatgccgagaacaatcgagcacgtagtctgataggctttcaaagccggttggaaattgcaattttagcttataatttggcttattgtctagaacgatttaactagcaccacgcgtattttttctattttccactcaaattaagagctatttgagaaatcaaagtatccatgaaatacataccgaaaaagacaaataatgccacaattaagatcttccatgaaatctttgataaatccttcaatctatgagttactgaaattccggcaaaggctaataccgatgtagttaatgataaaaaatctactgcattaattacacgaacacaatatggactaagcaaacagaaaactaatgaaacgatagacacccagcctagaatgggaaatcctctaacaatcttccacggaactcgtttcattaacatactgataataatgccaatcagagaaaacagccataatagacctaggccggcaaaagtatcaggtgtaattggggtgctcttaggattttttactaacttaatccactgaacaaataaaactaaactaacactaagcaataaaattaatgcatctctacctaatttataaaaattattttctctaatcatgttctgggtatacttctttctttttatcaagcaaactagtcaagtgaacatacatgaatctttgcaaaggaactgcgaggaaatacataatataagttccaataaaactagttaacaactgacttgctgccgcaaatgatagaatcgtctcactatgtttaggaaccagagctgctaaagctgaagaagctgcagtcatcatagaacttgatcctactccagaactcatcgcaacagcttgataactaaagcccatccccaaaagaactggtgctaaaattgagaagacaatcgaaccaaaaattgttccaattaagtaaatacctaggactcctcgaccttccggtgaatcaagtgtatatttttcactaatataggctagttctccttctctgcctaatcccaatgttgagccaatggcctcttgtcttaatcctagtaataaagctactggtagtccaaataaaattgtacctaaattacctaactcatgaatgagaaatacccaacctactgataaaatttcattaatcttaggtgcaacatttgctccataacgtgccattagtggcaacattattaaaatcatatattttccagcaaactttactcttttatcattgtagagttgcttaatcggctttaatggaagtaaataaataataatcgctaaaataactgcgaatactaatggtagaattgaaacttcaattttaccaattttgaaaacctgcatccctataaattccgcaatagtgtcaatcaatagcactaaaataattaatggaccataattttttaaagatttcatttttctgctcccattttatttaattgttcaagatattcctgatttgttctacgataagtcctgattttattaagattatttgatatttctaaaacactgttaaagataaattccgggaatatgtccagtacaaaaactggatcaactaatttaaaatcagagccatgaatggttccattccaaccaccatatccaatctgaatagttggcattagataacttacatcaccaatatcaccagctgccatggtatagcctcggttttcaatcaattctgaaatcttgtcattccttaaaaatacattttttactaaagcattcatgtctctattcgaccttaaaggcaaatagccaacctgtgtttctgacttaaaattaccgcctaaagctagggagcatccttctgctgcttgattgaattgcttcattagttgctgtgcatattcgacatcaaagtatcgtatatctgtccccatgctaacatgatcgggaattacattaatcgattctgtattatcacctatcatcactggattaaacctaatttgatttggattttttaattgttgacgtttgaaggccaaagcagtggtaaatagggtggctatactctgtgcatttaccccctcttcaggagcaaatgctgcatgactcgccttaccaaagaagtcaaagtattgaaaattaaatccagctaaatcacaattaatttcaatagtcctacgctcaaaatcttcacctatagcatgaactgatacacaataatcaatatcgtcaaatacgccaagtttgatggcttcctgcttacctccaaagtaagtaaaatcaccagctaacttatgctttttgcgccaattaagatctacaaattcttcggctggagtaaaaataaaagccaaattagtgccaaactcgttgagacgatcatttttcatcagttcatttatcaaagccaaggctgttgtcacctgagtatagtgaccacaagcttgcgccgctcctgtttcagggtcagcatccttatgacctggctgataaagtgaatccaattctgcaataatcccaatagtttttgggcaatgattatcaaacattaccttaagtcctgttttacaataatgttcgatttttatattagtagaaatcttagcaatttctgcttccactgccttagaagttttatactccttatagcctaattctggattgtgtagtaaataccctgctagttcctgtaattctgagtagtattcttgaaaacttgacatttcaatctccacttattcaaatcatcagtaatacgtttgatggtttaaatactacatcgtaattcatactaaatcaagaactatttttacattttgggttatgtttattcgcttttactggagaatttagtaaaatgtttactttaatttgaactacacaaacaagcatccccgcaagaaaaatctcacgaggatgccttatttgtggtaaaaaatatttagaatttacgtaaaccatgttggtaaacttgtttatctttttgaccaactgcagcaacattttctaatggattctctcgtaaaactaagaaatccgcatattttcccacttcaagtgaaccatattcttgatcaaccttaagcaattcagcactacccaagccgcctgctcttaaagcttgataatttgtggctcctgctctaactaattccaccaactcatttggtgtatcagaaaagcgattgaagtatgttcctgcatcggtacccattgccaatttcaccccttccttaattgcatgtccaacatgattataaaagtcatcaactactgcacacatcttgcggtatgagaactcaggtacaacatcttttccatgaacgacgattgtccgacctgcagtcaatgttggtgataaaaaagtaccttgctttttcattaaggctaaatcatcttcatccagataaaaaccatgttcaactgagtcgacaccagcaacaaccgcataatgaataccgcgtctcccctcagcatgggcacaaaccgtcatatgcttagaatgagcttcttctactgccatcttcatttcttcaagagaaagttcagtatcatcaacttcatcacctaatgacataattccaccagttgccatcagcttaacatttttagcacccttggcaaactgttcacgcactgcccgacgcatgtcctctggaccgttaaccaaatgactagcattttgctctccatttaaccccaccttgaaatcaccatgtccgccgacaattgacattgccattccagttggcatcacttgaggaccttcaaaaggatactgcttgcgcatctgcactaatttacagtcaacatcaaaggatgtgccacaactacgaacataagtcacaccagtttgtaaagcttcacgcagatcccgcagtgctgcataagtagtagaagcttcagtagtcggaaattttttcttcaagtcagaatcaagccccatgtgagtatgtgaattaagcaaaccgctcatcacatatttccctttaaggtcaacttgtttgtcaaaatctgctgtgcattttcccttaccttgatcggtcaatttacctgtttcatcatcaacgacaaaccaagcattatctactagattatcttcattaccaacgaataaattacaatttaaaaaagctgtcttagtcattattttttctcctaatcattacttacagatgcatccttaaagctgaaattaccacccaagaattctacatttttaacacttggtcgaaccatccaagcttgaccatcatggaataatggcgtcaatccttgttgatcagttaaaacacgttctgcattatacaaatcttctaatcgcttagtaggatttaattccttatctgaattattcatatacttgtcaaaatctttgttagaccatttaccgaagttataactttgtcctgtcatcattgtgtgcaattgtgaattaggatctaaatagcccgaagtcaatccagtaaagactgcctcgaaatcaccattgagcattttcttaactctagtagtcttcggcatgcttctaacagttacatcaacttttttgccaaaggtatcttctaattgactttgcacaaactctaaaacctttttagaaacgtcatcatcgtcacccattaaggtaaaggccaacttattcttacccaattcttttaatgctctatcataaagtttcttagcgcctgtagggttataattcatatacttattagctggatttttgctttcaacatactggtcaaaattcttaccatcaacatattcatttggtccagcaaaagttcgagctacggtattagcaccaccaactgttttagccaattgagctcggttaagtgccattgaaactgctcttctaaaatcgacattagctagttctggatgcttggatacattgaaagtcaagtattcagttctatctagtttatagactgtataaccagattgacccttcagtctctttgaagcctgaacatcaagataggcaccatctaatttgttagcctgatacagattgtaatcagttgaaggcgtcttttgtacactataattaaccgtctgcaatttaactttatctttgtcccaatattgatcattcttttctaacttccagttaagacttgaaccagtccagcctttttgaacaaacggaccattgtaaaccatatacttagatgcagtcccgtattttttgccaaacttttcgactacgtgtttattttgcggattccaaccaactgacaaggctttaaaatacggtacgggatgtttcaagtgaactaccaattcatatttacccttagcttcaacacctaaagtcgacggagcttttttcccagctaaaacatcatctgcattaactacatttgaccactcattttgctgttgtgattgtgtcttaggatcaagtgtccgtcttaaagaataaacaaaatcttcagcggtcactggatcaccattagaccacttagcattctttcttaaagtaaaagtccaggtcaaaccatctttactctgattagttttagtagccacaccagatacaactttacccgctttattcagtctattgagcccttcaaaaacattagatgcctgttcactaccagttgtatctaccatctttgaaggatccatagtttggatttctgaggtagtcatccaggtcaattcttgtttaggtgctttagcaccagattggcttgatgaacatgcagataaagtacttacgcctaaaagtgctactacagtcgtgccaaataagtgcttcaatgtttttctcatttttatctctcccataagtcaaaaaattaacaacaagcttatgataataaaaaaacgccctactagatcaattgatctaatagggcgtcttcaacgcggtaccacctatttattcgtagaataatactcacaaaaattctacctcatgcacgtgcggctgattctatcaaaatcagcgatacgtcgccgctatagagggcggaccctgaaaatgctaatatcgcactttcagctcaaaggtgattttcacttaattcatcattatcttcttccaccaaccgaagactctctgcaaatcatttcttaagttactttccttatcaaagctcatttttttatttgttgtaaacaataatatcatgtatttttaatctgtcaattatttttttatttttttcaattgttaaaaataaaatgatcaattgcctcggcaactgcaccatgattattatcagcctgagtaatgtaatcgcattgctctttcatagcaggattgacattagccacaccaacacccacaccagcagcctgaatcattgacaagtcattaaaattatcaccaatggcaattgtttcttcaatcggcaccctaagctgctcagccagcttcatcagtcccgcgcctttattgacacctttacggttaaattctaaataacgattagacgaatatgaaatatccaattcttgcgtaattggtcctaattcagcggcgatccggtgcaaataattattatcaagactctcatagagcaccttggcaattttctgcccctccaaaaatgacaagtctttatcttcaatctctttaaactggtgtcgtcccgtcatataggcacgttcatcatcatcgatatgatacgtatataccatatcttgagtgtaaacatgcatggcaatatctagttcaaccccatgccgatataaccgatccgcaatttcattaggcaagccgtcaaaatacagcacgcgattattcttattttctgtaatgctggcaccattgaatgaaatcacatattcattagctgcctgctctaatcctatttcctttaaagtattttggacagaaacgtagcctcgtccagttgcaggaacaaattttacaccgtgagcaactgctttttgaatcgcttctctattttctactgagacatgcgtatctgcgctcaacaacgtttcatctaagtcacacgcaataattttatacatctagtcacctcttcatgcttagtttaccggagacacgcaagcctagcaaggcaacaaatcttgtaaaataacataatccgcctaagtataagcgattacaaaatagtaaaaatatttttcattacatagttataatagacatgcaagcctttaaataacagcgttcttgcgccttgaagacggtaaaaaatcatgctaagttagtgtcaaaagaatggagttaataagatgacagataagatatacactaattactttatcaaagatgaagattttgacaaaaaccacttccactacaagaaattaagcatccctcaaggtgtagaagctcagccattagctgtccctccagttcttgcactggataaggaaactgatactgatgtctggttcactcttgaatcaattgaaagcgaaagccaaatattgcctggagctaagaccaagacttggggttataacgctcctttgttaggtaaaaccatggtcttaaaacgtggccagcgagttcacgttaccttaaaaaatagtttaccagaactaacaacttatcactggcatggcatggaagttcctggtcctattactgatggtggctgtcatgcccctgtttatccaggtgaagaaaagcaaatcgaattcactgttaatcaaccagctgccttaacatggcttcatgctcacccatgtccatccaccgctgcccaagtttggatgggattagctatgggcgtagtagtaacagatgaaaacgaagctaaactcccaattcctaaaaactatggcgttgacgagtttccagttattttgcaagaccgtactttccacaaagataatcaacttgactatcgcgctgattatgatgcaatgggcgtcttcggtgaaacaccattaatcaacggcacggttcgcccttatgttgatgtaacaacacaaaagattcgtttactattcttaggtgggtctaaccgtcgtgaatggcgcttgcactttgatgatgacctagttatgactcaaattgcaggtgacgattcatttttgcctcatccaatcaaaatgactaagatcttggtaacacctggtgaacggcttcaagttgtagttgacttcaaggattaccatgatggcgatgtcgttaacctttatactgatgatttcaaactaattgaatttagaattcacaagtttgcacctgacaacagtgttattcctgatacattattcaaaccagaaattcctgaaatcgctgaagatttgccagttcgtaaagtaactatggatgatcacaacaagataaacggcaagcaattcgcaatgcagcggatcgatatgaagcaacaagttagtcatgctgaatactgggacgtaactaataccaactctaaggaacacggtatgttgcacccattccatattcacggcacacactttacagtcgtttcacgtgatggcgaaaagccatttccaaatgaatatggttacaaagacaccattcctgtcagaccaggtgaaaccgtccgcttgcgtgtagaattcccacaaactggagtcttcatgtaccactgccacattattgaacacgaagatgccggaatgatggctcaaatcgaagtattcgaccctaaacacccaaagacatacaagttaatggatatgaagacattaaccgacgcctttgctaaagaaagaggcattaaacctgaagatgtgtggatgccaggaatggataccgaaggttgcggcatggaagttgacagcagttctggtactagtcaaaaataaaggagcttcaaaatgtgctcaggaatgaataacttattttggaaaattatttgggtaattgtttacgccattactgcctactttacttttaccggcaaaatgatgatggcaatgtactggatggccggtgggatgttggctgaatcggttatctcactcatttactactttgttaatcgacaaaaataaactttttctcactatttcttccgttactaactttttaactaagtaaaaaaatttatttgacaaaattaaaacgagatgataaattaatagcaataattaaaaaatcttgatgaatagagtaattatagctagctttcttacagagaattactggttggtgagaagtaaaagaaactacttaatgaagatggattcagaatgattatactagtgatatttagctagtatcggggttgctctcgttaacaatgcaagctattgttagatagctattgaggtcagttatgtaaatagctggcaaataaaggtggtaacacgaagcactcgtcctttgaggatgggtgctttttttgcatatgagagaaagaaaaatgagaaaaagaagacagcggaatattattattggcaccattgttagcttattgattatcgtagctggttacttcagcttcttttggacgccaaaaagcaacggtcaaaccaaagttagcgtaggaatcgttggtgccagcaaaggtgacattgcaatctggaaaagcgttgctcaaaccgtcaaacagaaatatgggattattttaaccactaaaagttttgatggttatgaccaacctgacaaggcacttaaatccggtgacgttgatctgaatgccttccagcactatgctttcctcaacgcctggaacaaagccaaccatggcggaattactgcaatcggtaaaacctatatctcacctattcgcttatattccaaaaaatatcatagcctaaatgcactacctgaaggagcaacaattgtggtccccagcgatcccaccaatgaatcaagagcactttttgttttgaaaaatgccgggttgatcaaattgaagaaaggcaaagtattggtctctgttgcagatattactgccaatcctaaccacttcaaaattaaagaagttgcatctgaacaaactagccgcgtgatcgatgatgttgatgccgctgtcgtcaacaatgactttgctggccctgcacatctaggtgacaagcaaactatctttgtcgaaccattgaacaaagactctgagcaatggatcaatattatttgcgcccgcaccaaggataaaaataaaaagatttatcaaaaaattgttaaagcataccagaccaaaaagaccaagcaaatttacaagaaatactacggcaacaagcaaattgccgcttgggatgtaaaactaaaataagcaataaataagacgagaactacaatgactgtaattctcgccttatttttttataatgactattttttatttcttcaattgcttcaagtgttctttgatcttatctgcagcagcttgcaacttttctttttcttcagaagtaagctttaattcaatttcttcctcaatgccgtcgcgaccaataatagctggataaccaatataagtcttgtattcaggattataaactgaaacaggacaatatagatgagcatcgctaaagactgcttgaactaaacgagtagcacaagtggcaatagcatagctagtatagccctttcccttagccacaataaaggaattcttatttgattgttcactaatcttttcttgttcttcatcaccaaacaattggaaagcaatcttgttattaactcttaccgttgaccaggctgtaaattgtgaagaaccatgttcacctaaaacgaaaccttctacgttacgtggatcttgaccaagtttttcaccaattattctttgaactcttgcagtatcaaggaaagtaccagtaccaaagacgcgattcttctttaaaccagaagtttcttgcaaaatttgggtaattgcatcacatggattagaaatattgatcaaaacgccgtgaaagcctgattctttaatatctgcaccaacttctttggcatttcttgcatttaattcaaactcaccaaagcggtcgcctgtcttaactgaagccgcaatatcaccaaaagcggtaataataatgtcagcatcttctaagccgtcccaatcttgctttcgcacattaacatagctatcatttctagccaaagtatcatgcaagtcattgtattcagcatttactttagcttcatttttatcaattaaaatcagttcgtcaaccatactgtgcgtaaataaagtataggcaacggttgcaccaacatggcccatgccaataataccaactgttctcattttaaaatcctttcaaaaaaacaaaaaggaagatagtcatagctaccctccctttttattattaggctttaacttcgttaattacaacgtcaaacttgccaccaggagtggtaattgatacggtttcacccttctttttgcccaataaagcttgagcaattggtgaatcgttagaaatcttgccattcaatggatctgattcatcactacctacaatagtgtaagtttctggatcatcagtaccaacttcagtataggtaactgttttaccaactgaaacttcgttaggatcaacgctttctgcatcaacaacttgtgcatacttaagcatttcttcaacttgagcaattctatcctcaaggtgactttgttcatccttagctgcatcgtattcggagttttctgacaagtcaccgaaagaacgtgcaaccttgatacgttcaataacttctggacgcttaactaattttaagttctttaattctgcttgaagtttttctttaccttcagcagtcattggataagatttttcaggcatatttttaactcctcagaaattaattttctttatcttgcactgatcaataatattaatttacgtcaataatgtcaacctttaacgaactttaatcgcaagatcattttcaagagcagcaacaatcttatccatcgcgttattgacaacatcgtcggttaaagtatcttttctgttcaagaaggttaagttgtaagcaatactcttcttaccaacatcaatgtgagcaccagcataaacatcgattaccttaagttcagttaagtacttaccagcattagatttaatgacgttttcaatttcttggttagtaactggcttatcaactaaaagtgaaaggtcacgttgaattgctgggaacttaggtgcaggcactgcagttacgcccttagttaacattggaataattgtatcgagatcaatttcgtagccataaagctcgctaccacgaagtgccttatcagcaatcgttacagcgtgagcaatcattccgatcatcccaacatattgcttatcaatgtagattcctgcagttctagttgggtgcatccccttgatgcctttagcctcataaaccactttttcaggatcaataccaattgcattgaacaaattggttaactgtcccttaacaaagtagaagtctaccttttgggttaaatgttgccaattttccgcaaaagtattgccagagtaaatagctgctaaatgttcatgctcgttgaatttaccaccatcatggtcataagttctgccttgttcaaataaagctaattgtgtttgctttctagcaaagttgtaactagcagcatctaccaatccagtcatcaaattctcacgcattgcagaacggcttgagttaagtggtgatttaacttcaactaattcttttggatccttagtgtaacgaacggccttttcaggtgaagtcaaggagtaagaaatagcttccatcaagccttgtccttcaacaattgccttcatgcggcgcatcatttcttctttttctgagtagccaccatgagtttctggcaaaacaggttgagtagattcaaggttgtcatagccataaagccggcctacttcttcaactaagtcggctgggattgaaatatcccatcttctatttggtacatggacagctaaattatcaccatcaacatctaccttaaagcaaagacggtcaaaaatctttacaatttcatcaactgataacttagtgcccaatactttattgaggtatgaagcagtagttttaaccacaactggttcacgcttttggtcagttgccttaagaataccttcatcaacagtagcgtcagcgtcatttctaagtaaaagcgcagccatgttaattgccttttcagtggcatcccagttaacgcctttttcatagcgacttgaagcttcggtccggttagcgtgacgaagtgctgcctttctgactaaagttggatcaaagatggctgattcaagaatgacatcggtagtttctgatgtgatttctgaatcaagtccacccatgacgccagccatcattactggctttttaccatcggtaatgatgatatctttagggtcaaggtcaacttctttttcattaagcaaagtaagcttctcacccttattagcaagtcttacttcaaactttccgttagcaaaagtcttagcgtcataagcatgcattggttgaccagttaacagcatgatatagttagtaacgtcaactacattgttaattggacgaatgcctgcattccaaagacgacgttgcaaccaaagtggtgagtcttgaatcttaacattctcgagcttacgtaagtaaaacttaggtgcaagcttttcatcaactttaacatcgagtgaatctgtccaggctggaccatcttcttttaagacaaccttttcttcaacctttggcttttggtcgataatagcaccgacttcataagcggcaccttccatgcctaaagtatcagcacggttaggagtaatgtcgaagttcaaaatgtaatcatccatgccaagtgcttcatatacatcttgaccaggtttaacttcggcatctgctgggaatacgtaaataccatcgacaaattcttgtggtaccacgctatcgctaaagccgatttcttgtaaaccacagatcatgccgtaactttccatgccacggattttacccttcttgatcttttcattgccagcaatacgagcgccatgaagagcaacaatcacatcttcacctgcagctacattaggtgcaccacagacaatttgcaaaggttcgtcttcaccaacatcaacgtgagtcaagtgcaagtgagtaccttcaacgccttcacaatcaaggacacggccgacaactaacttcttcaagccatccattggatgaacacggtctggaatttcaaccccgctacgagtaatttcttctgctaattcgtatggatcttgaccatctaaatcaagaaaatcttttagccaattgtatgaaactaacattaattatctttcctccttacggaattgttctaagaaacgtacgtcattggtgtagaagtcacgaatatcatcgataccgtatttcaaaatagcgaaacgatcaagaccaacaccgaaggcaaaaccgccgtaaacgcttgagtcaacacctgcattttccaaaacattagggtgaaccataccagcacctaatacttcaatccagccagtgtatttacaaatagggcagcctttaccattacagttaaagcaagatacatccatttcaactgatggttcagtgaatgggaagtaacttggacgaagacgggtttcgcgatcttggccaaaaacgtgcttggcaattaattccaaagtaccctttaaatcactcatagttacgttcttgtcaataaccaagccttccatttgcatgaattggtgtgagtgagtcgcatcatcgtcatcacggcggtataccttacctggtcccaccatcttaagtggaccctttgagaagtcgtgcttttctaggactctagcttgatcacctgaggtctgacttctaagcaaatcttcatcatcaatgtagaaagtagcttgcatgtcacgagctgggtgatccttagggatattcatcatttcaaagcagtagtgatcagtttcaatttctggaccttgaactacttgatagcccataccaataaagtagctttcaagatcatctaaaataatgttgattgggtgctttgaaccaagatgtgcttcacgacctggtaaagtaacatcaatcttttcatcttcaagcttcttaactaacattgcatgaacaatgttttctttagcttcatctaattgagcattaaacaagtcacgtaattcgttaaccttttgaccaacttcacgtctattttctggcgcaacttcacgcattgagtgcaaaatcttagttaattcgcccttacgaccaacaagttcaactctgacatcattcaaagttttttcgtctttagccttgttgatttgcttaagcccttcttcatggagctcttttaacttatcaaataagtccattaaatctttcctttcaaaacaaaaaaagccccgtctccaatagggacgaagcgtcgcggtaccaccctagtttggacgtagcaacgcccacacttaagttttcgttaacggtgaaataccggaattgattagatcctactcccaagatgaaattcacagactttttctatcttctcttgcagcttttgaaagaagactctctttagaaaaataatctgttactagtcttgatcttagtaattaactattatcatatttcttttacttgtttcttgcaagttttttattttccctgcggcaaaacaatgtcactaggtctgatttccttaccaaagtatggcttcaattctttattataatcataagtaaagaagctctcacggttcagcttagtaatttcacgatccatccatttttgcagtgacttgttgcccttcttcaccgcaccagagatgtattggttagggccaatagttttaattccaacagtaaacttaggattacgcttaacccaagcatacaaataagaattatcatcggctaaagctgcgccacggccgtttttaattgcgttaaactgctgggtcttggaatcaaacttcagcaagttaacgcctttttgcttagtaaagtaattttccgctgtcgtacctttagtcacaattacactcttgccctttagctgcttagcattagttacaggagctgactttggtgaaattaccccgactgataccttcatgtatggtttggtccaactagccacacttttacgttcaggcgttaaggtgaagttagctagaacaatatccgccttatttgaattcaaggtatcaattcggttattggcatttacctgaataaacttgggtttaacacccaaatccttagctactctgcgcgctagacgcacgtcataaccaacacgcttaccttgtgaattaacccagccatatggcggcaaatcaccaaaaacggcaattcttaaataaccacgccttttaattgaagaaacattattttcactattccatctatcctctgaagcagtgccattgatgcctggccggctaatgccaatatagcctgcaaccaagactactactacgaataggatagccataatccagttaaaaatcttttttgccattgttcacacctaaaaatccatactttctaagaattcttgtgctcgcttcgttttcggtttggcaaagaattccttgcctggtgtatcctctaagatttttccatcctctaaaaacaatactttatctgcaattctagcagcaaagttcatctcgtgcgttacaatgatcatcgtcatatgctcatcatcagataatctttgcataatatctaacacgccacgcaccatttcagggtcaagtgaagcggtaatttcatcaaaaagcattacttcgggatgcataactaaagctcgtacaatcgctactctttgcttttgcccaccagataattcacgcggatacgcatccccatattccgacaagccaacttgttttagtaatttgactgcttcttctttaacctcgtcttcatcacgcttttgcactttcaccggtgccagcaaaatattttccattacggtcaaatttgggaacagatcataactctgaaaaaccatgccaatcttctgccgcaataattgccattcctttggactaggattaatctttttgccatggaaataaatcgcgccgtcttcatattcttctaggccatttaaggttctaagcaaggtactcttacctgaaccagatggtcctaataacgtcaatacttcacctttgttcaaactaaaattaatatcaaacaaggtctgatgtttaccataaaatttatttaaatgttctactcttaaaacttcttctgtcatttcattcacctaatttttagcggttaaacgctttgcccatgcagataatggataatctaaaataaagtacaagataaagataaaaccatatacccagaaaacgcctgctggatattgttggttattagcttcgataatttgttgaccaacattgatcacttccataatgttgataatcattaacaaagaagtggtcttaattactctagtagccaaattgatcgttgctggcaattctaatttgaccgcttgaggcaataatacatagcgaaatagctgcaagcgatttagccccaacgctaagccggattcacgctgcgtcttaggaactgattctagtgctccacgaacgatatcgctaaattcagcggctacccacattgaaaaggctaagactgccatccaagttgctggccagttaacgtgcaaacttctaggcaagatgtaataaactaagtaaagtaaaactacagttggcacgatcctaaagaattccaggtataggcgcaaaacaaagcgaatcggtcgatttttgagcgttcttaagataccaaaaattgtacccacagctaagccgataattaatgacaaagccgcaatccaaattgaagtccatagtcctgccatcaagcgagcaaagttactcccttcaaataaaacattaatccccgaatgaagcataccgtactctcctttcaagccaagttaataataaaatcaccggaatcaaaataattgcatatgcaactactaacatcagtaagtattcatttgaccgatagtacattccaattaagtcaagagcagtgttagtcaattctggtattgcaattactgaaaagattgaggtttccttaattaagaaaataatattagccgttaatgctggcatacttaagctgaatccttgtggaaaaaccacataacgagctagttgaaaattattcattcccaaggccttaccgctactaatttgactaggattcacaccattaaagccaccagtaaagccttcagccatatatgcgccgcctaagaaaatcaaaccgataatgccgcagacttctgccgacatttttaagccaattactggaaaagcataatacaaaaagaaaagttgaatcaaaagcggtgtatttctgagactgtaaaatagtttgtgtaaggatgaatgattccttaaatttatttctttaaacattagaaaaaggagttcctttctcgtatgattggtttgaacaaaaaaacacatacagaaagaagaactccttcatgaatgattttaccaaagattttgctcaagctctattcaatccagacaaaataaatgatttattgcgcaaagagctacaacaggctgttaataacttgttagaagctgaattgactgcctttctgggctatgatccctatgccagaaatggctggaatactggcaactctagaaatggtgcttatttccgcaaagttgatacgcaatttggcccaattgaagtgcaagtgcctcgggatcgcaacggtcaatttcatcagcacacgctgcctggctacaagcagcactcggatatcttggaaagcatgattatcaagctttactccaagggcgtgaccaccagggaaatagccgatctaattgaaaagatgtatggcagccattacagtccagctcaggtatcaaatatttccaagcagatgattccaaaggttgaggcttaccacaaacgcaagctaagcgacaagtttttctgtgtctatttggatgcgacataccttcctttgcgccgagaaacatttgagcgtgaagcagtctatattgccattggcatcaagcctaatgggcacaaggaggtcattgactactgcattgcacctagcgagaacattgaagtctggacagatatgcttcaaaacatgaaatcccgaggcttaaagcaagttgagctttttctttctgatggtgttgttggcatgaaaacagccttggccaggacttatcctaaagctcattttcaacgctgtttggttcatgtcatgcgcaatatctgcgctaaagtacgcgtcgacgatcgtgaaaagatcatgaacgaattcaaacaggtgcatcaacagacaaacaaagaagaagccacagctgtcctgcatgacttctataccaaatggggcaaggtttacagccatgttatcagaagcttgaaagacatagaaccagatctgctggtcttttataactatcccaagcagatcagagcttcaatttattcgactaacatgattgaatcatttaacaatgtgatcaagcgcaaagctaagcctaaggcagagtttccaactgaacagtcgcttgatgcttttattggcattcaggcaatgagctacaatgaccgttatttcaatcgaattcataaaggctttggtcaggttcaggacaccttagaatcctactttgattaaataaataattaaaaaatcaatttacgagaaagatctatttacacaaaagatttgacagtttcgtatttctagctagctcgacatatgccgttgaaatttgacttagtactggtagtttaaaatattgtactaagctgacaataatgcccacgataattgagccaacaatgccaatcaatgaaagccataaggtcagttcaaagccgcgcgcaaatattggtagagcttgctggataactgtccaattcattaaaaatcccccaatcatacaaaaaaagacctactcccataggtctctttaaacaatataaaaaagatctacgtcttttcagctaacataaatctttttgatctctggattaaagctattcggaaatacgaaaactgagttcttgagtattaaaaataatgttagatacacaagaacaacagtcagtattaacattcatcatacttaaagatttcattttcgtactcctttcacctaatcttattttaaataagcaacttacaataagtaatatacttctatgcttacttaatgtcaatagcttaagcccatttatctgcccaattatgtacttgatcaaaaacaggcttaagttccgcacctttttcagtcaaaccatatgaaataataccggtactttgatcgacgcttcttttaacaatatcgtccttttcaagttccttcaaacgttcaactaagacacggtcgctgcaagcctcgacagttcgtgccaagtccttaaagcgcatatcttgtgtatcacacaaagaactgatgattaagccattccattttttgccaataatcttaaacgcactaacaaaatgaccacataattcataatcttctggtttacaaggagctgcgtcctttttctctttaacttcttgcataggtaagtccctccgtattatataattccagtaaaaatactattatataaaatactttttagtattactaaaattattatagtagatctacttactaattacaagtgctaagcaaagtgatagatcatgatccctgctgcaacagcggcattaagcgattcagcttgtcctttaattggaatataaagcttttcatcagctaaagaagcaattgttttgcttatgccatgcgcctcgttcccaataattaaggcaagttgtggcactttttcgaaatcaggcaattgcttagcagaacgatcaagcagcgatgcataaaccggaatagttgcatcctgaaaatcggtgatcacatcagctagatcacgcttaatcaaatcgatatggaattgacttccttgcatggcacgttgcgttttaggattatacaggtcagcgctctctggtgaaagaactaccccatcaaaaccagcagcatcagcagttctgataatcgtccccacattaccaggatcagccaagttatcaagcagcacccacttgccataattaaacggaaattcttttggttgatcaatttttaataccataaaaatttcttgagaattcttagtcgaacttaagtggcgagcaatcgctttgttaattaatacgacattcttcccacttaaattaacttcatattcactatctgcttgatcaagtgcttcttcagtacctaagatatactgatattttttaccagctttaagtgcttcttcaaataagtgaaagccttcaattaaatataagccttcatcatcgcggtatttcttttgctttaacttcgctaatttcttaatcgttgcattattaactgaactaatttgttgcatatttttctcctttttgtattcaaaatctattataactgataatctattttgatcatgctaaaatcaaagttgaacttaatttaaataagggagataaaaatggaaacaagaaaattaatttgttcaggcttagttcaaggcgttggctttcgttggtcaaccatggcattagctaacaagatgggtattcctggcactgttaaaaataatgcagatggtaccgttacaatctatttacaagcagacagtgataaaatcgaccgctttattgaaaaactacctactgcatctggatttgcccaaattcaaaatattagtcaagaatcggttccaggtgtagaaaaaatgcatgattttcatgtattatattagagacatacatttttagatagaaattaagtggtgatttatttaaatgaaaaaaattaaaagatacgctggagtactggctttattagcagtagctactcttgtattaagtgcctgtggggcaacaactgatccacatgttgcaccgcacagcggtatttacggttgggtttaccaatggttaggccgacctttacaaaatatcatgattcaaaccgcgcaaatgattggcggcgataatggtgctggttggggaatcgtgattattacggtagttgtacgtgtaatcttgatgccattgatgttagtacagcaaaacaagagtgtacgtcaacaggaaaaaatggctcgtctgcaaccgcaaatgaagttgattcaaaatgcaatgagacacaaggggatcacccctgaccaacaaatgactttatcaacttggcaaagagagctttactctaaaaaccaagtttcattaactggtggaatgggctgcttgccattaattattcagttaccaattatgtggggaatttatcaagcggtattctattcacctcaattggcacaatccaaattctttggtatttctctaagttccaaatctgttgttttagccattattgcgactgtctttaccgttattcaaggttatatctcactaattggtattccagaagaacaaaagaagaccatgcaatcaatgatgattgttaacccaattatgactttgttcttcagtttatccttctctggtgccttagctctttactgggctgctggtaacttagtaatgattgtccaacaagtaatcgttacctttgtccttacacctagtgttaagaagcatattgccgatgaattaaaagataagccaattgaaactgttgttactaaagaaaaagtggatgctttgtttaactccaatagcggtcaaagcaaggctacaactgaagctaagaaagaactacaccaagacttacgtaaccgtaataaaggtaagcaaaagcgtaaatagttatcagtcaggagtaaaatcctgacttttttattaggaggaaaatatgcatactcaagaaatattacaacttttagatgatcacgatattagttaccaagttttttctcatccagcagtttatacaactaaagaagcagataaatacttgaaaaatgaagattttactaaatgtaagactctttttattaaatcgcgtaacggaaaaaattattatttactcatgttgcctgagaataaaaaagttgactggaaaaaagcacaaagtgaattactttctcctagtctaacttttgcttcagaagatgaacttgaggaaaaactcaaggttaaatctggtacggtttcaccctttaacttactcaatgattctagcaacactattcccttgattgtagaccaagcggccatggaggaaaataattatgttggcgtccatcccaatgataataccaaaactatcagtcttacttggacggatttagctagaattttaagttcctatggtcatttgtttgaagaaagatctctatagaaaaaattaagtttgtatctgagaaaaagctatttttaatcgatttttggctttaactcaaaacaaaactcctactatatcaaggcttattatgccaagatttagtaggagttttcaatttttagagttttcctagacacttcagattaattctttttcataatccaataaaaacgctatccaaatggataacgtcttcactcccaattaatctgattcttcagcggcccgtgtagcggcattttcaatagttttaacaggatttaatctaacacgaaagttgaagtagcccacgtgctcatcatcttcaaaaccatactcactataatcaccccaggaaacatagttagatgttcccttaattctgtaaaatagttgggcaatatcaccactaccaagaacaactggatctaaagctctaatcttttgtcctttcttaacagattgtttggttttctttaatttagaattatagatgtacaaatctgtctgcggaacaatcgtagttgcaccgccatcacgaaataccggattgccattgatgcgaccaacattcattgccttgatataagcacctctgccaatgtaataatagtcttgacctttaatcttataattcttaattgcatatgatttactaccacttaagtttgtgtaatagtaatcgtcagtttgtgtcttagtgcgacgcttaccagcataatttataattgagtatttaggaaaaacctgttgtccattaaagctaatacgcttgccattcttattataaatagcagtgttagcattcagcttcaaaacgcctttgccattcatggtattaacgttattagactttaaatacgtcccatcacctaaattaaaatatgaatcaggataagtagtccaacttttaccagcatatttaatcttgctacctttagttaaataagccttgccaccgcgataagttgataaacgattacccttgctattgtaaatataggtgtttttaataattccgatctcattattattccagttatagctaccaaccgatttcatgttgacataaccaccatcacctaaatctgcataggtttcaccattaacaatagcttgtggcatcccattaagattaataaaagcattgaccctgggtccctgaataacaataggttgcccataaaaactgatcggtttcttaaaatttatccgatcttggctacctagctctttaccattcttattatacaaagttggattggtatagctcttaacagttgtaatcttattcttcagagtacttgcccgaactaccggtgttaattgattttgacccgctaaagctgcaggaaccaaaagcgcagttccagccacaatacttaatacaattctcttaagtttcataatttatgacctctcttaattattttacccttgcatatacattatagtccctttaatataagtcactgctaaatcatgctttgcctaccgtttagatccaaaatcaaatctgcattatcttccattacttgccttcttttaccgaaaagcatccaaattgagaatagcaatggaacgccaacaattaatacagtataaatataatcagtgatttcgccattccaagaccagccagcagaattccaaccagattgcaaatcagaaatataatccattaaaaagtgatagatcatcggcaaccatagttttcctgtatagagatacaattctacccagataaaggcgctccccattacgccaataacttgtgcaattgttgcagtaaaactttctccatgccagccaaaattacttaaatgactaaggccgaacaaaattgctgaaccatagattgcaacagggatgcgatactttgggaatctattaaaaccagctaaaaaaattacgatcaataaatagcgttcggtttcttccaaaattccgagctcaatggctgcagttaaattaggaatattgtaaaacaaatcaatggttgccatgatcaataaagccagcaagatcttcttctgaaagcttgaacttttaataaattttaagtttggattgaagtgatagccccaagctttaactaagaaacaagtcatcgttaataaagcaatagctgcgattacaccttgataagtaagtgaatgaagccagcaaaaatctggatttattgctaaattttgtgcatcaccgtactgaatatcaagaaagtaaatagttagcaagcgtaaaaaccaatttttaatcggtccaacatgtacaactgcaattggaactagcaagaaaatataaaccgcccatagcagtaatactaatagaatctcgatagccggcaggttttttagcaagaaattcccagtgatatgccaaatttagcaaaaattactatggtcagccagcgaacaatttgagtattagtcttgctggaatcctttttaaattgcacgtaaaagttcaatcccatgatcgccgtactaaaagctagattgaacaaatcccctataaaataaaaatgattgttccgctgagaaaaagtataactaatcatcaagagaaaccagataatcaattgatagttaaaaactttctgccaaaatttccttgaaaaaatgcgttctttcattatgtcacatcccttaactttaaatatttttagctaattatatcgcttaaattaataaaaattataattattttcgaagcattttatttcttattttctaatacctaagcctctagagaaaaaaagtcctattaaatcttggtacccaaaccttgatttaataggattttgtttatgcctcaagattgctcttaggcatttgtttcttctcatttaattttcttaacttagcggcttttttcttagtcaaccgagggaacttcaatttaaactggctgccctgaccctcaacagattcaacactaattgttccgttataactagcaactaatttttgtgcaatcgatagacctaaaccattgccacctttttcacgggttctagccttatccacacgatagaagcgattgaagattttcttttgatcttcttcagaaatcccctcaccaaagtcttgcacaataatattaacattcttcttagttacaccagctgaaacattaatctgcttgcgatcagtcgaatatttaatcccattatcgatcaaaattactagcaactgttccaaatgaccgtgatacatttgaatctctgtatcatcaggtaaatcatcctcatccagctgaatcttgaagtcaggatgaaccattgccatatcagcgaccactctgcggatgatttcattaacatcacttacttcatacggatattgaacatcgatttgctcggctcgagttaaatcaagcatttcctgaattaaatgtttcatccgatcagcttcttgcaacgaagccttaattgattcatccaaaatctgcggatcatccttgccccatctttcaagcaggttcaaatgcccttcaattactgccactggtgtccttaattcatgtgagacatcaccaacaaattgcttttgttgctcaatgtaaccttgcatccggtctagcatttgattaatcgaagtagctaattcttctaactcatcatctcgatgtagttccttaattctagcctcactattaggatcagcattaacttccttagccaccttagacatcgtcttaattggccgaactacattaacaaccaaaatataagaaattgcaatgaagataattattgcaatcagtgaaataattaccatccaatgaagcaaattactcatcaagctattgtaataagtcatactattagaaaccactacatagccagttaatttgccatttacctcagaatagattttctggtaggttaaaagcattttgcctttttttcggtttactacttcttcaagttggttgccggcaaattcttttagcttaggtgcagaattaccattagtaaaaacaatttcatcatgtttgttgtaaactgctacattaatatctggattcgaaatcgatgaaatcaggctatcactaaatgctttattctctgtatcttttttgctaatagcaggaccgcccctcaaaatacgcctggtagacggtgacagagcaggaattacatttgagatctctagctcatcttgaatagaacttaatgtccggtccatcgtggtaactacattattagatgtctcttgttgctgttccatcgattgatgactaacaatttgataggcaacaactgaaaatatgacaaaagagaccgtaatcgttaatgcaacgatactaacccatcgcacaattagggatgagtgcttggcctctttttcctcgtctttattcttgatcatcatcttcatctcttaccatataaccggtaccacgaaccgtcttaatgtaagatggttgacctggagcgtcaatcttattacgtaaataacgtacataaacttcaactacgttagtttcgatattagattctggaccccagatcttgtttaataattgatcacgactaactacgttgttcttattttcaatcaaggtcattaataagttgtattcgcgtttagttaaatcgattgccttgccatcaccacggtgcacaattcggttagcagtttcaattgtcaaatctttaaattttacaatcttttgcttagcaacagtaacctttgatgcgtccttttcgattttaacgcgacgtaacactgcgcgaagacgagctaaaagttcttcaattgcaaaaggcttaacaatataatcgtcagcgccatgatccaaaccagaaacacggtcgatcactgaatcacgtgcagtcatcatgataattggcgtagtcttaacttgacgaacacgacgtgcaatttccaacccatttaaatcaggtaacatcaagtcaagcaagatagcatcaaagtcttgactcaatgcatcttctaatcccttacgaccattattctcaacaacagtctcgtaattttcatgttgcaattcaagctcgacaaagcgagataagttcttttcatcttcaataattagaatttttgccatgttaattcatttcctcgtagatcaatttggttttctaatactaataaattaattaaaaaatgcttttataattaaaggatactttaaaagtgcttctaacacaagattaaaaaacaatcaaagtaaaaattttctttgattgtccaccatatttttcaattacatttattacttatttttattgtccttatcattatcttgcccatcaagcaagaccttcaatttagcaaaagctgggttaacttggttcttcttgccttcttcaaaagaggtttcagaaacaacttcccaaccttgaccctctgggaaaatattcttttctttttcttcaggagtcaaaatagtagttggaatatggagtaaaatattatcttctaccgctgtttgcaagtcaatttgatcattctcaacttgtacaatagtatcgttttcttccaattcttccttggttggcttacgatcaaggtagttttcagtaaaagtaaaatcttcatgatagtttaccggcttaaggcttctgcttgatggcacaaccagatcagcggccacatgaaaactgccagtcacaaatggttcttgatagaacaagtcaccgctcacttttacatttttcgcatcaattagtagatctttactacgcttaaaaaattctggacgcatttccaaatcacgttcaatgtgagttaatggttccttggaattttgaatcctagaaaaactaagttctaacatttttacacctcgattggccgtcgaccaaagttttgatcaacgcccattatttgttcaaataaacggtctaccctaacttgtaaagctaaagagccgttcttagcacttcttttatcaactttagagacgatttctgtctgaaattccttgcgctgttgctttaaatatttgcgacctaccttactaaagcctaagagcatcaaagactcatgattaaagctagccaatatatcatcctgagtgacattaagcaaagtatataagctcaaacggcgcaaacgggaataagtataacgcttggacttgatatgccgcaaaaattctgtaaaatcgcgggctaaatgaatctcttgtttcatcttatattcaagcccttcgctcatttgataaatatgacgcaattcttcaactgaagatgattcaattcgatacttcaaaaatgggtatagcaaattccaattaggataaattttctgctcagctaacaccattgcttctgctttaggcatccaatactttaaattttttgtatcttcaccatgcaataataagtttcgaatcgcactagcactttggacaactttttctctttgtaaaaggtcatcatgtcctgctccaattcggttgaccggatgcaggtttaatggtgaacctaaattatgattagctactgaatacgctaaccccaaaatagcatttggctgattaacttcatagcctacttcatgcgctaccatttggttgtattgtgttgaataagtttggctataatctctaaaatccatgtgattctggggaatttccgcaattcttttacccaaataagcaaaattcaggttagcatcttctacaccaaagactaaatcagttacgcctaatttagcaagttgttcaatgtttccgagagcaaaaagatcagctggttctactgccgttgaaaatggtgtttcaaataccaaatcggcaccagattgcaaagccaccttagcccgctcccacttgctcataatcgccatctcaccacgttgcacgtagttaccagacatgagcaccacaattggatcattaccagcaaccaagcgtgcttgatttagcaagaactcatgtccactatggaaaggattaaattccgcaataatcccaacaacactcattgcttaatcttccttcaattcaacttgcttaccgttagcccatagcttttccaagttataaaattcacgtgcttccttagtaaagacgttgactacaacatcacctaaatcgagcaaaagccagttagaatctctggtaccttcaatacggtagtcagtgtagttgttttcgtgagccgcatcaacaattgagttaacgatcgcatgtaattgacgattagagcctgcactggtaataacatagtaatcagctaaaatactgattccacgcatatcgtaagcttcagtatcttcaccatgacggtcactaattgcttgggtagtaaaatctaaaatttcttgactagtcaatatttttctcctttttattacttaattccccatacattgtatgcttctaaagtacgaggatatactttatttttattttcaattaaaaactctaaggtgtgctgcaattcatagcctaccccttcatcaagactagcataagcaactttgcgcgcttcttcaactcctggaaaatctcgtccgggttcaataaaatcagctacaaagataattttatctaatgtagtcatcttagtatcaccagtcgtatgacgacgtacggcagttaaaatttcaggatccctaatttttaaatcacgttcaataaagaaagtccccacaatgccatgccagatggcccgattccaattaagcaaatctggatcaaaatcctgttccttaattaccttacgatactcttctaccggtacctgcttggcataatcatgaacaaagccagctaaggctgctttttcttcatcatatccatttaacttagccaacttacgtgcagtttcactaacacgaacacaatgttcaaaacgttttttcttcatgtttgccttttctttagcaacaatttgttcactagagaatggtgaataagtatttttaaaaattagtttcgtcaaggtaaagccccttttcttcaatatattctctgacggcttctggtaccaagtaacgaattgaagtgccagttgcgacactgcgacgaatagcagtcgaacttaggcgaatatctggtgcgtcaacccaaatcatgggatattgcggatcttgtggataacctggacgacgaattccgaccaatgttactagcttagccagggtcggagcttccttccaagtatggaaactgttaacctgatcactgcccataatcaaataatagtcattctgaggtgctttttccttgagataacgcatagtatccacagtataagaaacgccgcctcggaacaattccaatagttttaccctaaagttaggattgtcgcgcgtagctaaatcaagcatcgttgcccgatctttagcagaagtcagcggcgcatttttatgcggtggaatattatccggaataaaccagacctcatccagcttcaacttagtcattgcttgctctgccgctaccaagtgcgcaatatgcaccggattaaaggtaccacccataatcccaatctgacgacctttaccttgttcttgttccaattctgcttcaattttagcagttggcattttttcaatacattttggattaaccatatgcaaacctctaaatcaatgcacgacgaatacctaaaccaatcccatctggtgtgtaagtcttaacaacgcatcccttgggtacagtcacaaaaccaattccaccaaataaaaggtcactcttatattccgttctaaattcttgaccctttagtggtgccatttcatcatctgcagctggtggggataacaattcacctttatgctttttataaaagtcatccgcattagctgtcttagtacggtgaatatacattccacgagcaacgtaaacagtaaagctagtcgattcgcccttgagataatcaatccgtcccaaaccagctaagaataaagtattaccaggcaataattggtaagtagctggctttaaaggcttcttaggtgagaccagctccaaatccttagcatttaagtgcgtagccaattgattctcggtcatgatcccgggcgtatcaatcaaaaagtgaccattttctagaggaatttcaattttgtctaaagtagttccaggaaagcgtgaagcggtgatcaggtcttgaatatcacccatcatgtcaataatggcattgattaaagttgacttaccaacattagttgtccctacaaaatagacatctttgtcttgcgattgcttattaatataagcgatcaaatcttccaagttcaacttctttttagctgaaaccaagaagatttccttaggataaagccccattcggttagcctcttgtctcatccaatccttaatcttactttgcttagagtttttaggaaatagatcaaatttattaccaactaaaataaaatcattatttccaacaaaacgcttcaatgatgatagcaaagaatttgaaaaatcaaataagtcaactacattaacaattaaagctttcttttgtcctaaagagttaagcaaagctaaaaaatcatcgttgttcaaatcaactggcatgatttcgttataatggcgcaatctgaagcaacgttgacaataaacatccgcattttcttcttgctttgccttatctagtgcactttttggcagataacctgctttttcaggatcatcggattgcagcttggcaccgcagccgatacaaataatatcctcatccatttgatagctccttcttaaatgttactcgatgtgataaacccaggaagaaaaagataattttttcaaagaaacgattgattctcgtattccacttatcagtttcaactaatggcttaactagaacagtcttcacgccggccaaattccctgcttgcatgtcagtgattagttggtcgccaaccatcataacctgatctttttgcaaatgcattgcttcgcgcttcttggtgatcgcaaatggcaatggcttacgtgacttagcgacaaattcgatatggtaaggatcaagtaccttacccactctttgagcattattgttagaaatgaccacgagagtgattcccgccttggctaacttttgattaaaattatccatttctttggcagtttcaaatttattccaggcgagcaatgtattatctaggtctgaaaaaaccgccttaatgtccatttcattcaacttctgggggtccagattgtaaatcgtatcaattgtatattttggtctaaaaagcatatcaacactgctatataaaacatagaaatatgtagaagaatgtatattttttacatatcagaaagaaatatagtccttcctttcttcgctttatttactgctgtcatcattagtattccaatattccaatctaggagtaatcgcattgactaactcttgcagcttaagggcttagccagccccgttttcattattttgctaaagctaaaagatttaacactgcattatcatcacgatcattagtataaccgcattcataacaaacatactcattgtgcttagtgtgatgtttttggttgccttgcaaagtgattttttcatcaccttttttaacataaccacaattagcacatcttggggttgatggatatgttttatcagccaagattaattctttgccataccactcacatttataagtcaatatctgtctaaacttactgaataatgatctctgcatgccttttgaagcgacgtgcgtcatcatcatttgtttaacggctaagtcttcaatcactatttgatcataattattaaccaattttgtagtgaatttttgcaaaagatcgttttgaatgttggctactttacgataatcacgttgcagtttggttctcacttgcacgtaattattgctttggccagctaacttgccattagcccgtcttttcttagccagcattctctgataatgcttaatgcgcttgtatagtttttgcaatcttgatggcaaaacattgattttgcccccagtgtagttgaaatgtcccacattaacatcaacagctgtctttctacctgttctaggctttaccaaagtttcttcttcataagaaagagcggcataataatgtcctctttctctaaagacactagcaactttaatttgcttcatttttaaagcttcatatgttggaatatcgaaccaggttttaatgcctctgggcttgtctaagcgtagcttaccattaaccactttagcccggtcagtcttaaagccttgtcgcggggccttctttgatttgaaatgtggttttccaaaatcaggctgtgccttatcaaagaaattcttccaagcattagccaaatctttgactgctaattgcaagcatctagcagacagagcaaactgccagtctgccttattatcgactagctcatcacgtattctgcgctcatttggactgggattattatccttatctaaggttcgtgcttcatacatgtcttgccaagtggctaaagcttgattccagcaatatctgcgataatcacaaagcttatccagctcttgttgcatggtcttgttaggttttaattcgactacttgagccttgatcatttgtttcacctccaatacaaacataaatttagcaaagagtgaaataaatacaagcgaacaaaatattaaatttttagtttttgacctgcttctatgttttatatttctgaacagatctttgtatcttgtctatcttttaactgttaatttcctccattttttatcaccttatatcatatcaaaaatgggtttgctttagaaatttttgtttttttctgatgaaaaagtgttacaatactaaacaatttaagcaaaatcatcaatcaacagaaaggatcaccatgagaaaattcatcgatttacaccttcacctcgacggttctgtcccagttgctactgttaagaagttaatgcaggaacatcacatgccacagttaactgatcaaaaattgcggcaagaattgtcagttgataattcttgcgctagcttggaacaatttttggaaaagtttgacttacctaaccagttaatgaagacaaagcatgatctggagatgattgtgtttgatcttctttgcgaattaaaacaacaaggtctagtctacgccgagatccgctttgcaccgcaattacatactaaaaatggtttaacgcaaagacaagtaatcgctgcagcagtcagcggtattacgaagttttatcaaaaacaaaaagcagacaaagatcagcctgaattacacgctggtttaattctctgtttgatgcgcttcgcccacaatgaaaaagaaaacatggaaacggttgagctagcgaaagaatttttaggtcatggcgttgttggccttgacctagctggtgcggaaggcccgatccctaacattaactaccagcattttttcaatcgtgcccaagaattacaccttccttataccatccatgctggtgaggctgcgggacctgattcaatccgtcaagcattaaaaattggcgcgaaacggatcggccatggcattcgctgcactgaagatccagcacttacccaatatctgattgatcaccaaatcatattggaatgttgcgccacttcaaatatgaacaccaaagcttttgatcagattgattcttacccaataaaaaaattattgcacatgggaatgaaagtcacgctaaattctgatgatatgatcgtttccaataccaatttaccgcatgaataccaactgcttgaagaaaagaccgccttgactcctgaagaagaaaccactctttatctcaacgcggttgacgcggcctttactacgccagatgaaaaaattagattacgagcattaattcaaaaatagataaaaaaataagctaggaaaatttccctagcttatttcttttgttattagttcaaagctttcttagcagtttctgctaattgtgcaaaagtctttgagtcgttgtaagcaatatcagctaacatcttacggttcatgtcaacaccagccaacttcaagccgtgcattaacttagaatatgagatgtcgttttgtcttgcagctgcgttaatacgagcaatccataactttctgaattcactcttacgtcttctacggtcgcggaatgcgtacttgtatgaaacgaataattgagtgcttgcagccttaaattgcatgtgctttgcgccacggtaacccttggcaagcttcatgatcttcttacgacgttgacgtgttactgttccacctttaactcttggcatttaaaattcctcctactatagtctgtcttaattaagaacaagtattagtgcatttgagcaaccatttgcttgatacgcttcatatcactctttgaaaccatagcagcttttctcaagtgacgacgttgcttctttgtcttaccgtggaaacggtgaccagtaaatgcgtggtgacgctttaaaccaccatttgcagttctcttaaaacgcttagcagaagcgcggtgtgttttcatctttggcatatttctatttcctccaattaactactttttctttttgtccttatcactcttaggtgcaagcatcaagaacattgaacgaccttccatcttaggcttactaattacattagcaatgtctgaggttacttcggccattttttcaagtacttgttgacctaattccttgtgagtgatggcacgacctctaaaacgaattgagacgcgaaccttagctccttctttagaaatgaacttacgaacgtgcttaagtttagtttcgaagtcgttaccttcaatagttggactcaaacgaatttctttaacactgactgtcttggaattcttacgggcttccttaagcttcttttgttgttcaaagcggtacttcccgtaatccatgatacgtgctacaggtggcttagcattaggtgagatcaaagctaaatcaagccccgcatcgcttgcacgacgcaaagcatcactcttgctcatcacaccaacttgctgaccatcttcatcgattaaacgaacttcgcgagcgcgaattctttcgtttaggattaaacttcttggtataactgttcacctccgtgttaatttgaggacaagaaaaaggcgggttataagattcatacccgcctttaatcaacagaaattatcgatcagcctagaggtttacttaacttaggcgagaagcgggtgcttcttcttgttctcaactagtagaattatacccgtttatctcacctgcgtcaacacgatatcacagttttctcaaaatcattaatcaacctcacaataatctgctttcccctcttgcttggtatggcgataaacattagtatccaatccgccaacataaaaacctgtatgtaaataaaataaacatgcaccaggattattatcttgcccttgtgtgtaaagtccagcatagtcattttctttggcaatttcctttgccttagctattaacttttgcccacatgctggccacgatagtttttattcactttaagatcagataaatacatatatttaaaaaatcctggttgtaaaattgctaatccaatacaatttttaccatcatatgcaccaatgaatgtactctctttcattgcatcatagtcataattttcatcaggaaagcacatttctgtaactttttctgatgaatacttttttaattgataatcccatttaccgttattataagaaaccaaaatttgtccgaataatttaaatggctcattaagaatattaatctgaaacttgaaagctaagattaacgctctttccccgcgcctcttggctttttcttatcaaaaataaaaacgcaggctctctctgcgttatactttaagtgtcgacctaaaaagtaaaggagatcctgcgcaatgaacagtatagaacaaatcgacacagaaaatgatactaaatccttaatttcttcatttattaatctaattggtctagctaagttaactaaacaagtcaattttaagcgtaaatccaccgtttcattaaccatgattatctcttggctgatgtcagtacattttgctcggctttctttattcagagctaaggatgacaaacgtttttccgttaggactgctcgcaatgtacttaacgatggaagaatcaactggcaaaaactattatgcttgattgcagcccggctcattggctgcttaaaaccatttatcgataaaagacgccgacttgcttttatcgttgacgatacgctgatggctcggtctttttctaaaaagaccgaattgctagctaaagtctatgaccatgacaagcatgagtatttgaacggatatcgtggtttaactttaggctggagcgatggcaataccttcttgccggttaactttgccttgatgtcaaccaaaaccaagaaaaatatgattggagctgctcccattactgctgatgaacgttcaatttctggtaaaaggagaaatcaagctcagagaaagatgaatgatgtaactgtagagttgattagacaagccttacgattaggagtagaagctaaatacgtcttattcgattcttggttttcttctccaagaatgttttggattttaaagaagatcggtttagatggacttggcatgatcaagaagagttcaaagatttattacatttatcgccatcgccgctatagcgttaaagacttgtatgatcgtttggctgcttcaaacatccgtaaaaagaaacattatctttattcaagcatagttgaggctcaatatcatggacatagctttttattaaagctcgtctttgtctccaaccgtggaaacaagaacaagtatttggttttagctactactcagacaaagcttagccctgaagaaatcatccaactttatggtcgtagatggcaaattgaaacatattttaagacgtctaagcaatatcttgctttagataaatctcaagttcaaagctatgatggccaatgtggctatatcgcagttacagcaataacttatgatctattgacctggcaggaaagacaaaatacagatgataagacaatcggagatttattctatctaatgaacgaatccttacctgatattagattcgtagatgcattggtctacttaatttcagaattaaaagagcttaaacagaatagttttgaaaagatagatgaagtaatcaatgactttattaaccaactgccacgattcatacaaattgcactgaaacagatcatataaaaactaattacgtctaagaaagctcaatagtgacaggacttgagcttgattttggtgctttcaattttcagatattaatatctactttgtgctgtgaatcaattatttttgttgtaatcatatttatttctcttattcatcaatttaactcttacctgaattgtcaaattaagtgcaacagttaggttatgaagagatatattgcttgaagagttcctctgctgtgtgatattggaggattcggcgatatttgtggttaatggcatcagttgcctgttgaacataagcttttgacttgtctttcatgctcttgctcttagggaagaattgacgcaaaagaccattgcagttctcattggtgcccctttcccatggagaatatgggtgagcaaagtaaatctggcagcccttgatcttggtcatatccgcaaactcagagccattgtcaaacgtgattgatttaaaccaggcaggatgtctgtcaatctccttttgaagcagcctttggcatgtgcttgcccgatagtcaggaatcttgataactacttcaaagcgtgtggttctttcagtcaaagtcattaaagcaggctgattcttgcgtctgacgcctttaaccagatctccttcccagtgcagcggagcttttctgtcttcaatctctttaggacgctgttcaatggaattgccaagatgcttcttgtgcaaagcgtgaccgccatggctgtgatgacgcttgttcctgcgtcttttgagcttcataggcagatcaatattgcttatgtccagcaagccctgatcaatatagcgatagacggttggtgtgctgggacaagggtagcctggcatagtccttttgaattcaccaacgaactcatcgatgctggtggcatcaaatttagctttaaagcgtctggagagcattctcaaaaagacagcataatgcttcaatggattgcgctgatagcagtttttgcgacgcttctcataataaatctgtgcagtatcagcgtaatagtgctcatacaataaatagctgctgtctctttgcaggacgcttccgcgtttgatttcgcgactgattgtcgacttatggcagccaacttcttgagcgataacagtacgggaagttatgccggaatccagcattgcttgaatttgtccacgttgtacgctggttaattgatgatagtgcttagaaatgctagaatttgaattggtcatgaagatcttcctttcttgatttttcgtcacttcaagtttaggtcttcatggcctttttgtttaacacttagtgttgcacttcaattttaaatccgggaatttaactcttagtataatgctaacgatccgttttttctcacattacgattagtaatttcaaacatgatcagtccaattattaaccaaagcacggcgttaaacaaagaagcagctaagtaaaagcctagactgtagggatgttggttaacagctagtctcatccagctaaccatgggagaaataggtaaaagacaaaataaacacttaactcccaaagaataattttcaaaattaattagtaaaattcccaaatatacatattgaaaaattgctaaagtactgccaattcgcttaaaatgcaaaatcaaactcacaactaagtatcctaaaccagtagtagtcaccaaagctaacaagaaaggaacaaccagaacaataggaaatttaatccaatgatcagttagcaacataatgattattaatgctaacactgcctgcaccgccgaaataatgatattaactatgcttttattaagaaataatcttctagcagaaattggcatcaaaaactgttgctctaaaataccattttgcatttggttggtcatagtcatccccatttgactaattgtgttctggattaaagtccacaaaatatagccaatgaccaaggcattcagtgaagttccaattaccccgccgcctactaaggtacctccaagaaagatagctataaacatcatgattagcaaaataaagtctgaaaagtaactaaatgaatatcttttatacagccacatttgtcgccagaactcagcttttaaactcgtcattattcttctcctgtgtagtattcaaatatatcttctaaatttctctttttagtttggacctgactaatcggtaattctcctaataactgaagcacttttggtaaatcattttggcatttaacttctaattgataacgatcagcctgcttttttgtcaaattacaataagttgatattttttctttttccttagcagtaagtgattgtgacaaggtaaattccaaaatcgtccatttattcaatctgaccaggctttctttcatattatctgaaaagactagctctccctgattgatcaataaaattttttgagccactttttgagcaaaacctaattgatgagtagtaatcaagactcccacgccatcggcacttagttctttcaaaatattaattactatttgagctgatttaagatctaaccctaaggtcggctcatctaatatcagtaattttggctgcgcaatcattgcgcaacagatccctactatttgttgcatcccgcgacttaaactggtaatcgtcgtatcttttttatcccacagaccaaacttctttagcaattgaaggccattatgctccgcttcttttctagataaacctcgttggccaccccaataaataaaattctcaatcggtgacaaggaccaaaacatattccgcgagccttccaaaagaactcccgtattttttaggagcaataaattgctattggtcatctctttcccctcaaaatatacttttccatgatcaggactaactaaattcaaaatcatctttaaagttgtcgtcttgcccgcaccatttagtccaagaaaagccactatatcgctatgatctactgtaaaagaaatatcttttactgcttttttgtttgttgcttgataagtttttgataatttgtctactgttaataatgccgtcattttactcaccatttttcttcaattttttgttaatttgattaacctcatgccataaatgaaagaaataagtgccataagcaatggtgtacataatgataaaactgataactgtagtcattagtaaagaccaagaatagctaaaactattgataattaaattgaaaagtacccatgctactaaacaaacaaagaaattgactacaatttgtgttctcaaagaccaagaatcattattaaaagtccaacctgcaaaataaaaaaagacacctattaagaaagatactattaaccaaaacaagaaattaacagctgacaattttaccgtttctaaatttttccagttagaagaaaataataggtccactgcaaaccaggtcataccaattccaattcccatcaaaccactatccagcatatatcgagcatgtttcataatcctagcctctctttcagttctttaatccttcgtcgtgagatttgcacatgtaactcattattcaaaatagcatcaatattaccattactcagaatttgcaaatgatctaactgatgataattaagcaacgcgcttcttgatactgtcacgaaatctgacggcaatactttttgtacttgatacaaacgtcctttatacaaataggtatcttgctccgtatacacgtaagttttatcattttccttttatgaaatattttaatgaaataatgaaaataggagttatataaggaaaggtgataaacttgaaaaataagctcattatatttatgacaactgcgctattcatgttagctattattgtaatgggtcaaaatagagtagatgctgcatcctggggagctaagaacttatttactacgccaaagaaaactcgcggaacatggtactataagcatgaaggcaaaatcaagaagcttaaaatcacaacgcatacatttaataaaatcaaattgtataaaatgttgagcagtaataaagcaattaagtggactaaaaaattagctaaggctgataagaaatcaggatataaattagctcaaaaggttggtacttctcagtatgaagctactgatttcaaatttcataaaacaccaggttttgctgctaatggctggctatctagcgatagagcagattcaggacacacttatgttgctataaagaaaaaagataaaagtaataatgataaagtagatgcactgagagtaggaaatggagcagataattcatttttatattattgctataagagcaaaaaattagtcaaataggttataataattttattgattattcaatcacatttttatattttgcactgaaatcttaattcagtgcttttttcatgaggattagactaaataagatgataatacgccagcgaaaaaattatttaacttctcaatttttatctaagattagtgcagatggaactttgaatattgaaagtttgattgttctgacttgcgcaatttttattgcaagtgttggattaaatgttaattcaacagctactattattggtgcaatgttaatttcacctttgatgggaccgctgctagcaattggcacaggccttgctttatatgatgttactttgctgcgtaaaggaacgatttcattattagcagaaattattatcagtttagctgcatctacaatttattttcatttttctcctttgacttatgctagccaagaaattattgcacgaacttcaccaacgatttgggatgtaatgattgcgttttttggaggagttgctggaataatcggtgcacgtaaaaaagaagcaaataatatcgtacctggtgtagcgattgcaacagccttaatgccaccagcttgtacgatagggtattcaattgcagtaggcaatcttaaatattttttaggatcaagttatttgtttttgattaattgtgttttcataattttgactgcttttttgggtgtaaaaattatgaaatggctaagttattctactaagcaatctaagttgtttttcttacgcaagccaacctttaaagagttttcgataattttagtagtaattattttaattattcctagtatcttatcagctaatcagatggtgaataaaactctagtagatcaaaatgttcaaaatcttgttgttaatgagttaggcaatgttaatctaattaaagaaaatgtcgatacgcaaggaaaaataattaatcttacagtttcaggtaataaaattaatgctaagaaaattcaagcggctaaagcaaatttgacgaaatatgacctggaaggttattcactgaatattgtgcaagtagctcaggttaatccaaatgcagaaaatcaattagatcgacaagtaaataatattattaatcagcgtcagcatgaacaagaacaagctgatgaaaaacgtcaacaagaacaagaaaaacgtaatcaagaaattcgtaaactgtcctctgcaatatcttctgttactgcagttagtgataataaaaataagcaaattactttgatagagttaaaaaagccgctatctaagaagagaaaaaacgccttagtaagacaaataaaagataaatatccaaatattaatttagtggaatttgttcaagaaaatattaaaaattagaaagcatataacatattacttttattgtgaaatatcttgatactaaaataagagactgtaaaatagtttgtgtaaggatgaatgattccttaaatttatttctttaaacattagaaaaaggagttcctttctcgtatgattggtttgaacaaaaaaaacacatacagaaagaagaactccttcatgaatgattttaccaaagattttgctcaagctctattcaatccagacaaaataaatgatttattgcgcaaagaactacaacaggctgttaataacttgctagaagctgaattgactgcctttctgggctatgatccctatgccagaaatggctggaatactggcaactctagaaatggtgcttatttccgcaaagttgatacgcaatttggcccaattgaagtgcaagtgcctcgggatcgcaacggtcaatttcatcagcacacgctgcctgactacaagcagcactcggatatcttggaaagcatgattatcaagctttactccaagggcgtgaccaccagggaaatagccgatctaattgaaaagatgtatggcagccattacagtccagctcaggtatcaaatatttccaagcagatgattccaaaggttgaggcttaccacaaacgcaagctaagcgacaagtttttctgcgtctatttggatgcgacataccttcctttgcgccgagaaacgtttgagcgtgaagcagtctatattgccattggcattaaacctaatggacataaggaagtcattgactactgcattgctcctagtgagaacattgaagtctggacagagatgcttcaaaacatgaagtccagaggcttgaagcaagttgaactctttctttctgatggtgttgttggcatgaaaacagccttggccaggacttatcctaaagctcattttcaacgctgtttggttcatgtcatgcgcaatatctgcgctaaagtacgcgtcgacgatcgtgaaaagatcatgaacgaattcaaacaggtgcatcaacagacaaacaaagaagaagccacagctgtcctgcatgacttctataccaaatggggcaaggtttacagccatgttatcagaagcttgaaagacatagaaccagatctgctggtcttttataactatcccaagcagatcagagcttcaatttattcgactaacatgattgaatcatttaacaatgtgatcaagcgcaaagctaagcctaaggcagagtttccaactgaacagtcgcttgatgcatttattggcatccaggcaatgagctacaatgaccgttatttcaatcgaattcataaaggctttggtcaggttcaggacaccttagaatcctactttgattaaataaataattaaaaaatcaatttacgagaaagaactatttacacaaaagatttgacagtttctaaaataaattttgtaaagtttgttttattataaaaacgtaaattgcaataataaattgaacacttaagctgcttgataggtatgatccaattctctttcaaagatttcatctggtgtatgatatgtcaatatttttcttggtagcgaattgcaccaggtttcaatatcaatgatttgttggagagaatagttattgatgcagtctcctttaggaatgaatccgcgaataagaccattatgtctttcaacagttcctttatcacaagaagtataaggatgagcatagtaaataagagtcttagaaacttcttctaaattagctaaatccgcaaactctgaaccattgtcaatagtaatcatcttgaagatgtcattccagtgctcgctgcattgtttttgaagcattttaaaagcctgcatgacactggcagaggtatgcgaataatcaagaattcacggctcatgcgctcagaaagcgttaatagaacctgatcatctttggttttatgccctagaacaagatcacattcccaatgaccaaattcattccgctggtcaatctctttaggccgctcttcgatgcttcgtcccagctttttcttgtttttgcgaacatgatggagcttggtattacgtttaagtttttcaggcaaatcatagttcttaattgcaattaggccttaatctacatagttgtacaaagttctggtgcagaccgtttgatgatgtgagaattcaccgatagctaagctacgattggcacaaacgtcaagtgaccaaccgtcctcaaaaaaagcttaatgacgtagctaataaagtttgctttcttcaagaagtccgatttacgaccacagtgacgacgattaatctgataaacactttgaccatgttcagctttatagcgctgctgcttgccatgatagagagaaacagtacaacgtttgacctcatagctaattgtagaaggagagcagcccaattcgcgagcaatcgctctaatagaataaccatcttttaaacgtgttcggataacaacccgctcttcaaatgataagtgcttgcctttaacgtgctgattcatggtaaaatgtaaagagtccatttgtgacctccaatagatgtttttgtggttattaacattctatcaaacaggtccggatggacttttatttttatcaagtgttcaacttgattttacaatcggcgaaaataattaaaataataattttcaatataaaaagtgagaagattgataataaggtcttctcactttttgaaactgtcaaatcttttgtgtaaatagttctttctcgtaaattgattttttaatcatttatttaatcaaaataggattctaaggtatcctgaacctgaccaaagcctttatgaattcggttgaaatagcggtcattgtagctcattgcctggatgccaataaatacatcaagcgactgttcagttggaaattctgccttaggcttagctttacgcttgatgacgttgttaaaggattcaatcatgttggttgaataaattgaagctctgatttgtttgggataattgtagaagaccagcagatcgggctcaatttccctcaaacctttgataacatggctataagctttattccattttgcataaaattcatgcaagacagctgcagcttctttttggcttgtctgttgatgtatctgcttgaattcgttcatgatcttttcgcggtcatccacccggactttagcacagatattgcgcatgacatgaaccaagcagcgttgaaaatgagctttaggataagtcctggtcaaggccgctttcatgccaacaacaccatcagaaagaaagagctcaacttgcttcaagcctctggacttcatgttttgaagcatctctgtccagacttcaatgttctcactaggcgcaatgcagtagtcaatgacttctttatgtccattaggtttaatgccaatggcaatatagactgcttcacgctcaaacgtttctcggcgcaaaggaaggtatgtcgcatccaaatagacacagaaaaacttgtcgcttagcttgcgcttgtgataagcctcaaccttggggagcatctgcttggaaatatttgatacttgggctggactataatgactgccatacattttctcaatcaagtcagcgatttctctggtagttacgcctttggagtagagcttgataatcgtgctttccaaaacatcagagtgctgcttgtagtcaggcagcgtgtgctgatgaaactggccgttgcgatctcgaggcacttgcacttcaattggtccaaactgggtatcaaccttgcggaaataagcaccatttctagaattgccagtattccagccatttctggcatagggatcatagcccagaaaggcagtcaattcagcttctagcaagttattaacagcctgttgtagctctttgcgcaataaatcgtttattttgtcttgattgaatagagcttgtgctatattttttgtaaaatcattcatgaaggagttcttctttctgtatgtgtttttttgttcaaaccaatcatacgagaaaggaactcctttttctaatgttttaagaaataaatttaaggaattattcatccttacacaaaatattttacagtctccataaattaaaggggatgacaattcttttacttcttacttacaaacgtaaaaatcaattacattagctttaccaaaaaaacgtatgcaataaagccatcttaattagacctggcatagcatacgtttttttattttattttttaattatattaattaattttctcttgagtatgacttaacatctgcatcaatttcattaataaaatcagtaaggctcttagaaatttcttcgtcagtaccgtaacgacgtacgtttacgctaccgttcttcatttcttcgtcacctaacaccaaagtgtaaggtaccttttgggtttgtgattcacgaatcttgtaacccatcttttcatttctgttgtcaacttctactctgaaaccgcgcttagcaagttcttgacgaaccttttcggcgtattcgccgtgagcgtcgttgttaactgggatgatttcagcttggattggagcaagccaagttgggaaggcacccttgtaaatttcagttaagtaagcaatgaatctttccatagtaccaacaataccacggtgaatcataactggacggtgttcttcaccatcttgaccaacgtaagttaagccaaatctttctggaagcatgaagtcaagttggatagttgacatagtttcgtcattacccaaagcagtcttagtttgaatatcaagcttaggaccgtagaatgctgcttcaccttcagcttcaacatagtcaaggccaaggtcatccatagcacccttaagcatcttttgacttctttcccacatttcgtcatttgcaaagtacttgtcagtattctttggatcacggtatgaaagtctgaagtagtaatcagtaatatcgaagtccttgtatacgtccatgattaacttcaaaatcttagcgaattcagtttgaacttgatccaaggcaacaaaagtgtggccatcattcaaagtcatttcacgtacacgttgaaggcctgacaaagcgcctgacttttcatatctgtgcatcataccaagttcagcaacacgaagtggcaagtcacggtatgaacgaatgtggtgcttataaatttgaatatgtgaaggacagttcattggacgaagttcaagcatttcgccatcacccatgtccattggtgggaacatgtcatcacggtagtgtgcccagtgacctgaagtcttgtaagcatcaaggttcattaatactggagtataaacatgttgataaccgtcagcaacttcacggtcgatgatatagcgttcaacaacacgacgaatagtagcaccctttggcatccagtaaggaagaccagcaccaaccttaggatcaacgaagaagaggtcaaggtcacgaccgatagttctgtggtcgcgttccttaatttctgcacgacgcttcaaatcttcctttaaagcagcttccttgaagaaagcagtaccgaagattctttgaagcattgggttggatgatttaccaagccagtaagcaccagcaactgacaaaagcttgaagtgcttaatcttaccagtgtttgacaataaagcatcaaagccaaagtcaacgaaatcacctaacttgtaagcatcaaccttgtcagcatcaattttcttcaaaagatcagtcttgtaagggtcatccttgaaaatatcttcaagttctgacttgtccattaaaacatgttcaattgcttgaccactcttaactaatttttccatagccttttcaagttctggcaattcagtaaccttaatttggtcatctttgtcagtatctacgtaaaagccaccttcgtcagcaacatgttgacccaaacgaagttctgggtacttattcttagcaactgcttcaagtgcaaaagcagcagtagctcttaaaatgtctaagccttcttcatccttgtcagtaagaatagcaacttcaacatcattgtcaatttcataatcaagtggcttaacaacgccatttactttagcaccaacggcagcttttccaagagatgtagcgattgatgaagccacttccttaactgaaacagccttatcaaaatctttctctgaaccgtctggcaaagtaattgaaaaactcatatttttacctccaataaaaaaaatcccagtgctaataaaagcactgggacgtgttaattgcgtggttccacccaaaattcaggttagcgtacgtctaacctctcgtatagattgataaaggtatccagcctcttaaaattcaattttgggaataaacgattggggtgattttctaatgaagaacttccagaactaggtccttctctctgagccgaacatcatcatgtctcgtttaattaacttcaattatacgcatcaaagtgaacgatgcaagaactttttgaaattaatgcgaaaaatttcgtcgatcgggaccggaaactactacttctttagctaaaaaacgtactcgttgcattaatcttttagctttaactggatcagttgcattacgggtttcctcaaagtgtgactctaatgcttccatatctaaattagaagagaaaaaagttggcaagacattatccattcttgcctgtaaaattactcctaaaacgtcatcacgtgaccactgacttaatgtttctgccccaatatcatccaaaattaagatatcgcattcagctaaattcctgatctcatcttgcaagctgttatcaccaaaatgacttgataaacctgcaataaaagttggaacatgtaaaaatacaacattccgatcaaaattagttgctacatagtttgcaagtcccgctagcatataggtcttcccgatcccaaagtcgcccgacaaataaaggccttgttggtgaggatcagctttgtactttttcaaaaaatcataaatcagggttaaagcttgctggcgatcatttgtaacctcaatatcacttaaattaacatcatgcaatttagcaggcagatcaattaaatgaagacgccgcttggctgctcgttgctgatctgctacaatcttagcctcggtaggtttataacgtacatcaattactttgccgtttaaaaataattgcggagcataaccggccagcacctgattctgactatgtttttgcgcataatattcatagatattggccatactatttcgaatcatcgccttatctattttttccctatttgcctgcaaaaacgcttgcacatctggatcgtgtaaagcagttttcaacagttctttctcattacctaaattacgctctttaactatttttttaagcaaatcaccaattgcttccattatttcacctaccctctatttacttatttttcagatccttaaagatatccttcagctgttctgttgacataccttcatttttagcctttttcttgctccaatcggtacctttttcgactcgcttattttgtcgatatgactgtcgatttttctttttaagaatatcggctttacgcttcttcacatattcaagagcttgtaccccagtactaataccaccttgcagccaatcattagctattcgataagcacgattagaagttacaacagtatcgtaggtcaaacaggtatgaatcaaaatattaatcaaatcttccggcaagccatactgcgtgtgcagctgattaataatatagttttcgcctggagctacaattccacccttttcagtttttaatttgtataaaaattcagatggggaattttcattagcttcgagtaacagttttctatcattagcatccaaacctttgatagtcgcaatagcgcgctttttgccttcttcaatttgtttttgaatgttttccctagtatgcaatcgtttataattttctgctatggtattactaatttcatgcatgtttaatttatgtgtaccatgcaaacagggaacagtctcatccacaaattcctgttccgataaattatatgtctgtattaagccccgaatttggttctttttaatttctacttcttgagctggaatttgatagacattatattgatctttaatcagatcccaatcaattggatcctgggcattaatttcagcagtttctatctcaggcgctttattttcctgcgcagcttctactacctcattagatggattaattgcttcatcccctggcaagcgaaaaacatcaaaaaagttggctgagacatcgcgcgcattcttgattggcttttcacgcagttttgcttccttagcaaaagcatgactcaagtcatgaaaggttgggctgccaactttttctttcaacaaacttgctagcagtggtgttgcaaaaaatttgtctgcactaggaacctgtaataacttaaaaacaatgatattattgaagacattatccgctaaaaaagtttgcactaaacctacggcttccagtttatgcaaagaatgaaacatatcttttaaactacaatcaagttgctcctgtagtgaataaattccctttgaatcagaaacaataccatatggatcatagtcattgatcaaagtctgatacaaggcaattgccaccgcgccaaccaaaggctgatacagtttaatcaagattttctcattctctggaaaaagggtaatcttgttggctacataataaagatgcttaggatcagacgttgcgaacatgactaattaccctttccttttttggccatcatatcttccattgtcttcataaagctagacatatccttgaactcacggtaaattgaagcaaagcgaatataagctacgtcatccaaattagccaaatcatccatgacatactgaccaatcttcttagatgaaatttcactaacgccttgttttcttatcttattttcgacacgatcaaccaattgctcaaattgttcactactgattggccgtttttgtccggctgccattactccgtgcaaaattttctttcgactgaatggttcacgagtaccatcattttttactaccaacaaaggagcagtttccactcgttcaaaagtagtaaagcgaaaaccacaattttcacattctctgcgccgtctaatagcccggttttcatcactaggccgcgaatcaataacgcgagaagcattttgatgacaatttggacattccatagctatccctcttctctaatctttaccaataattgtgctagtttattctctagttcttttattgtaccagtattttcaatcacaaaatcagccaattgctcttttttgaccataggcaactgactttgcatccgaattcttgcttcttcatcggttaaatgattccgctccttcaaacgctgtaattgcattttctcaggcaaagtaatcactaaaacaccgtcagctatatctttcttatccatccctgactcaaaataaagtgggacatcaagaataactattggttgagcttgatattgatttagcaatttctttgtttgcaaaaaaatcaacggatgcgttaactcatttaatttagttaaagcccgcgaatccttaaataccaattgccctaatttctttcgattaatcgtttggtcatcatttaaatactctgagccaaaataatctttaatcgcctgccaagaagcttgcccaggctccatcaaatcatgagcaatctgatcatcatcgatcacaggaattttatttgctttaaaaaactggtccgctgtacttttcccagttgcaataccaccagttaaggctaaaacatagctcattaataaaccacctgacaatgtggacagaaggttgtccctctgcctgatactttaatcttttctagttccgtgccacactttgcacaaggttcacctgcatgaccataaaccttgagcatttcttgatagccaccaacatttccgttggcatctaaataagtatgaacagtcgtcccacgcttttttgttgcaattttaatagtttggttaatattctgccacagctcttttgctttttctgctggaattttatttgcggcactcaaaggatgaattccactctgccacagtgtctcatcaacatagatattacctaaacctgcaacggttgtttgatcaagcaagacatttttaatatttttcttcttacggctcaaggccttgataaaataatctgacgaaaattctatgctattaggctcagggcccagtttgccaatccccgtcacttggcgctcagtacctgttaaaatcagctgcatgcggccaaacttacgcacgtcattataacgcaaggcagtttgatcagtaaaaataaactctacgtggtcatgcttatccttaggcgcatcgggagtggttaaatgatattttccctccatgcgtaaatgtgacacaatagttaaattatcacttaggcgtatcagtaaatatttagcatagcgatcaatctttaagacccttttacctggtagttctttgataaatttcttatggtctgttgccacaattttgggataccaaagtactacttttttaatcgtttttccaacgattagcggagttaaagtccgtcgcaccgtctcgacttcaggcatttctggcattaaatcacctactttgcatcataccaattatgaccccaaccagaatctgcaatcaatggcacatcaagcttcactgctgattgcataacttctggaactatcttcttaatcgtttctaattcatcttttggcacatcaaaaatcaattcgtcatgtacttgaacgaccatcttggtcttcaaatgtagttcatctagcttcttttgcatattgatcatagcaatcttgataatatcggccgctgatccttgaataggcgagttaatcgcagttctttcagcaaaagaacgaactgtaaatttcttagcatgaatatcaggcaagtagcgtcttctgtgcataattgtttctgcatagcccttttcacgagccgtttgcacagccttatccatatattcacgaatttgtggatattgttcaaagtaattgtcaataaactcttgagcacgttttctagaaatacctaaattctttgataaaccataatcagaaataccataaacaataccgaagttaacggctttagcatgacgcctcatcaatggcgttacttcatccggtgaatctaaatgaaaaattctcattgctgtatgtgagtgaatatcatagcctgtcttaaaggcttcttgcatattctgatcaccggaaacatgtgctaatacccgcaactcaacttgggaataatcacaagagaagatgtaaccatcaggattggttggcacaaaggcttttctgatttgctttccttcttcagttcgtgtaggaatattctgcaagttaggatcaacactagaaagtcgaccagttgctgtcaatgtctgtagataacgcgtatgtacgcgaccatctggctgaatcacatcaagcaagcccttgacataagttgattgaatcttagcaatttgccgataatctaaaatttcactaacaatcggactttgtgtctttaattggtctaatacctcaacagaagtggaataaccggtcttggtctttttaattactggtaaattcaatttttcaaacaaaatatgacctaattgcttaggtgaattcaagttaaagcgctcgcctgcttgttgatagatcttatcctccagctcttttaaccgaacagcaaattcattttgcagttcgagcagagtacttgcctccactttcattccgttgatttccatccgggctaatacacgagcagtcggaatttcgattgtatcaaacaagtcatcttgttcgtgttccttaagcttctcaagtagtggctgcttcaagttttcgatagcattaacctttgaagccaaatgattaaatagttcttcatcgtcatcaggaacatgctcacttttgccttttccatagatttctatatcggttttaactgaataatcaccatacaagtgagcaatttcacctagatcattggaattattttcattattgatcaaatatgaagctaacaacatatcataatcttgaccgtgaacatggatacctaatcgatgtaagccaaccattgtccgctttaaatcaaagacatttttcttaatttgctcatcttctaataaatgtcgcaaattagtctcttgtaaaagttcaacatctcgtgaaacgtaaatttgataattgatttttaaagcaaaaccgacaaatggagcaaggtgatagttagcacctagcatagcaagataaaattcaatttggtcatctgcattagctttgattttcttgacattttggtcatcaagaactgtgtattcaactttttctacttcagttgcatcttggccttgaccgctagcattcagttctgccaagaacttacggaaattcatcttttcatagaattggcgtaatttttcataatcaattggttggcgcttaacgtcatcaatatcaattgtcacgggagaatgacgatcaattgtagccagttttttgcctaaaatagcattgtgtttatcgcgaatcaaacgttcttttcgtttagaagctttcaagtcatcaatatgatcatacagattttcaactgtatgatatttttggatcaagttagaagctgttttaggaccaatcccctcaacgcctggataattatccgatgaatctcccattaaagccttcatatcaatgaattcagttggcgttacaccatttacttccttcatatgttcaggagtataagcctcaagctgtgatacacctgacttagtcacttcaaccgttgtcttgtctgaagccaactgcgtcaagtcacggtctcctgttacaattgtagtaataaaaccattttcttcgcccttagtagcaaaagtaccaataatatcatcggcttcataatcttttaattcataagtcttaataccaagatcatgtagcatctcttgaatatacggcatttgttctaacaactcttctggcgtcttagcccgaccacccttgtagtcaccgtacattttagttctaaaagttactttgcccacatcaaaagccaccaacacatgagtcggatcgacatcttttaagagtacatcgagcatatttttaaaagcataaatggcattagtatgcaaaccatctgggctcttgaatgattctagttggcggtaaagtgcatagaaggctctaaaagctacggagttaccatcgattagaagtaattttttatcagccattttatctcccttttaacaaatagatctattcttttacttatctattttaccagttttcatactaatctttcagcatgttgttttagtaaaatagtgaatctctgttaattacgatttttactcaaaaatttaattaaattctttgtcaaaaaaggattttatcaatcagtaatcaaaacaaaaaagcacgtaagtgcttttccatattattcagcgtcatcctgactgccagattcatcccatactttctttaaagctggaacctttcctaaatctgtcatctcatcttttccaacaacaatcaagttgttcggaccttgtgctaattgattgaagctgtctaagctttgatttctgaagtagccttccccagctttagctaaagcatcctgcatcttttatacacggtatgcatcagcatcggcttgtgttttaacagcttcagcgttagctttagcagttgcaaccaaagcatcattcttggccttagtggtcatttcaatcgttcttgcttcaccttcagctttggcaatagcagcggtcttctcacgatcagcagtcaattgtttgtccattgctctttgaatttctggacttggtaaaagttcatcaacgtttactctgacaaccttaattccgtaaatatcagttagatctccagttgctgtaaacaattgatcattgatttccttagttgaacctaaagccgcattcaaatccattcgaccaatgatgtcacgcaagtgaccacgaattaattgcaccattgactcaactgaatcggtgttgttgtagaagtagcggtatgaatcagtaactaagtagttcagagtcaaggaagtagtaatctctgcattatccttagtaataattgaatactttgaaatttctaatggctgcaatgccaatggaactttccgaattcgttgaaataatggccaaacaaagacaaagccagccttaacagttttagaatatttacccaacgtttcaactaagccttcattattttggggtacaattctaaaaccacaacaaatatatgcaataactaaaactaaaacgattagcgtaataacaatacccatttttatacctcaactaaaaattactcgtccttcttcttgggatcgactcccttggctaattcacctagtgaactatcggtctgctctgccaagcggttaagcttttcatcaagtagatgagcatactcatacttgttcatgtagtccaagttggcccaagcattaggaatctcaactctaaaaggaataccattacgtaaaataatttgatcataaaacatattaattgcagtagctgaattcaaacctaattgctttaaaattgcttctgctttttctttcttttcaggattcattctgacataaagtccagttgttttctcagccatggtaccctctcctttctatttaccactattatatatcgtttgcatataaattgcatagcttttttacaaaaataaaaagactaccttttgcagtagtctcaagaatctaattttagcctaaatcactaatgtggaaaatttgattctccaaagttcttaacttaaactcgccatctttgacatatttttggtggtaagccacagttagataaatgtcatctggcgcctgaacatgaatactttctacttcactgtagcgatcaggcaaatcaataccatcaatcattgctacttgccagttctctggattagtttcaccccatggaaacttaacgatcttacgtgaccaagtagtaacttcaccattcgcatgatcaatcttgggtgacaattggttagaaatataaatattcttgtcatcatcaatggcgtagccctgaacagaatcaatcatttgtggagcttcttcacttggtgccacgcttggatgatcaaagttatcaatgtgaaaagcactaaggcaatgcaaatcagtaattggcgtgttcttagtgccattttcattcaacttttggtttacttcatttaagtcaaacaaaccaaagtgacctgaaccatcatcccaaattgaagcaatcatgaagtacttgccatttggtgaaactgaagcttctactctgtgcaagtgatcatgaccatcataaggaacgtcggttacgtgattcaagtgtgacaaacgtggaagttgtgtatttgaagtatatctttctggtaaaagtcttgggtactttactcgtgcaatttgagtagtccagttgcctgaatttggtttagcacctacgaaatattcatccttgtcattagctgctacccaggtttgcgtgtggccaaagcccatcattactaagtgtggatcagtataatcgatgttcttagttaaaccttcatgttttctataaaccaacacatcatgtgcactgtgaagaagttgcaaggcaaaaacatgatcaccatttactacaccaacttgggctacaacatggtgcatcccattcaagcgataaaacaaatgaggtgtaatacttttaaccattcttatttatcttctttctttatatctattcattttcacttatacataaattatatcctatcatcaaaaaatagattgactttatgctgataacttccaataattagaataaatttttcttggagggaaaattatgaaaagaagaacaacacttttattgtcgagtgcagtaaccattgcggcattatttagcttcaactcaaaagttcaagctgcggctgatcctacgatcaaggcaacaaattacaacatgatcgtgaagttggacactcgcaagaatcaattaacagaaaaagttaccatgcacgttgttaataacggtaatgaacctgttaaaaatttattggttagaaatattgctagcggcgtgttgaaatacgaccacaagcattttgaggctacaagaaatgcgacaacttcagttaaaagcatttcatcagatggtcaaaagctttcttacactaccggtaaagacaagagcaatttatttgttaacaaaagtctaaatataggtgaatctactgatttaactgtcaacgtagttaccggcgtgcctaagagacaagatcgttttggctaccaaaatatcaacggcggtaaggtttataacctgtcattctgtttcccatacttaagcgattatcgcaacggtaagtggaattatcacccatactacgatgctggtgaaaaccgcaacagtgctgtaagcaatttccacgttagcttcttcgcaccaaagagctacaaagttgccgcttctggtcaaagcacaaccaaaaatggcaaaactacaattaccgccaacaacatgcgtgagttcgcaatcgctacttccaacaagttcaagattgaccacgcttatgcaaacggcgtaagaatcaacgactactaccttgcaagcaaaaacagcaagcaatacaacaagcttgctttgatgactgcccaagacagttttcacatttttaccaaaaagatcggcaaatatccttacaaagaaatcgatattactgaaggcttgcttagcaaagataccggtgggatggaatatcctggcttgatcatgatcgatgccagcggctttttactaaagaagcacccacttgatagatataatgaattaactgaagatgtttctcacgaagttggtcaccaatggttctacggcactgtcggcagcgacgaatacatggaaccttggcttgacgaaggtcttaccaacatccttgaaaatggcgtttacgatttgacctacactaagagtaaggcttactgtgctaaactgatgcacagcaagttctatactcgtaagaacgtcaagcgtgctaacaaaatcttaaaagaaaatgctaaccaattcattaataagaatcaaaaggccaactacatcaactaccctgttaataatccaccaaagggcgttgacactgaagacatggcttacgaacttgggatggacttccctgctgttttaaaggttgccatgggcgaaaacaagttcttcgatgctttacacgattactatcaaacttactgcttgaagcaagcaactgcacaagacttcttgaacattatccgcaagtacaataattcaaagaaggttaacaacgtgatcaataaatttattgatcctaagtacttaagtgaataaaatcaaataaccccgaaaacgtttgagtttcgaggttatttttatagtctcataagtgctaaaatcaacttaagggattattacaaaggagacaaaatatgactactaaaaaattagcaactatcgcagcagctttattaatcagtgttgcaccagcagctgctattatcaatcaacctgttcacacagttcaagcagctacgcaatcacaaaaaggtaaagttactctcaagaaatcctttaacggcacagttcaagtcttcaacagcaaaggcaatgccactaccactacccaaaaagtcaatggcaagaagatgactgttgcttcaacgattaaatcaggctcaagttttaaatattatggcaagcctatcctgatccaaggtaaaaaagtagatgcaaaaacttctaagaactaccactacactaccgcttcttacgttaacatcggtaaaaaacgctacatcaaatctttgaatgttagctcaatggatggacaaaatgttttaatcttgagttccaactctcgcatttatgataaaaacggtcaccgcactactttcaatggtttgtcactcatccctaaatatatgttagttaaaacaccagctaaaacccacgccacaactaagaatgacgtattttactacttctcaaatcttagcgggtctaaaaagagaagtttgaacacaaccactatcaagggtaagccattctacgccttaggtaatggcgcttatatctatgcttcaaatgttggctttgtcaacggcaacaccctttaccaagcttctggcaccactaccgccactattttaaacaaaatccatgttttgaataataagcttaaatcaaccagcaagttgctcaagattggtcaaaaagttaaggtagatgccaccaagaccactggtgaaggtgatgaagctggcctttacttcagaattgctggcaccaaaggtaaaaacgcacaatacatttactggggcgacgatgccgaatatggtatggatcaagaaagcactactgatgaatttcaaggtaactttaatttagataatcacctcgcaaattaacacaatatgctaaaattaaataaatgatataacgtagcgacctagaatagtgaggtttacctcaaagtatctttctaggtcgcttttttcaatgtggggggaaaatttatggatgaattatttgctaaagcgccgattaaaaggtctactttaagctagcattaccggtcgtcttagggatgatcactaccatgatctacaacttggcagacacgatgtttgttgccaaaacgggtgatacaaatctagtagcaggaattacgattggtgctccactttttacttttttaatcgctgtttctgacatttttgggctcggtggatcttcactaatttcacggctattcggtgaaagaaattatcaattaagtaaacgtgtaagcagtttttgtatgatcggtggatttgttactggtttaatactaacagccattttactaattttagaaaatccgatccttcatcttttaggagcaaaagctgccacctatcaagatgctgccgatttttatcgtgtaatatcaattggtgctgcgccaattatcttctcaatcattccgcagaacttaatcagaacagaaggtttagctacccaagcaatggttgctacaatgacgggaaccattttagctatcatccttgatcctattttcttgtttgttttcaaaataggtgcaatcggtgttgggattgccaacgttacaggttatctagtcactgatgctattctcatttactacgttttatacaaaactgactacatcaaattaaagctaaaatatagcaaaattagcggcaaaacaatcaaagatatcgtagcaatcggcatccccggttcaatcaccaacttcgctcaaagctctggcatggcacttcttaactcatctttagctctatacggtgcaaacaaagttgccgcaatgggaatcacccaaaagatttacagtatcgttatcttggtaatcgttggttttgcctttggttcacaacctttaattggttacaactatggtgctaaaaactggaaacgattaaagaaaattctaaacttcgatattcttgtgcaagttgtttatgctgtaatttcaggcggattattaattttatttgctcgtccagtcaccgctctatttatgaatcaaccagatatcgttaacgctggtaattatatgttaattgccactattattaccacaacaatcgttggtatcattttagtttacactaccgtcttccaatcagttggtaatgcatgggcagcgtttatcatggccatcgttcgccaaggcgttgtctactttatcgcattagaaattctaaaagtcacatttggctaccacggtatcgtttgggctcaagcagccagtgatatcatcacctgcatcatcggttactttatttatgaaaagagcctggatctcaaggataaaatcaaagattagccaaaataaaaactgctctcttattgagaacagtttttttcatgcttatctttcaattaaagcaatttttcaaaagcatcttcatacttaggaatatcacctgcacccataaagacaatgactgaattcttattcttagtcaagtcagcaatattgtctaagtcaattacttctgagccaggaatattcttaaccaagtcttcacttgaaatatcaccgttagcttcacgagctgaagcatagattggagttacgtaagctttatcaacgtcacgcaagatttcttcgaagtctttttgatacttcttagttcttgagaaagtgtgtggttggaacacaacaaccaacttcttgtctgggaacttttggcgagcagcttggatagtggcgcgcatttcagttgggtggtgtgcatagtcgtcgatgacggcaatgtcgccgaagtccttttcactaaatctacgcttagcacccttgaatgatggcaagcccttcttgatgtcttccattggcaccttttcggtgtaagcaacggccacaacagcagtggcgttcaaaattgagtggtcaccaaagaggtgaatctcgaattcgcccaagtccttaccgtgagccaaaacgtggaacttagaaccagtagtcgacttctcaatttgagtagcttgaaagtcatcagtatcattaaagccataagtgtacttaggaatatcggtcttcaaactttgcaaacgcttgtcatcaccccagacgaacaaggccttcttagtttgatcagcagctgattgaaaagcgctggtgtaatcggcttgatccttgaagtagtctgggtggtcaaagtcgatgttagtcatgatttggtaatctggatgatatgccaaaaagtgacgacgatattcatcggcttcatatacaaagaaacgtgaaccagcaacgcctttaccacgaccatcaccgattaagtatgaggtcggagcgacttcaccgagcacatgggctagcaaactagtagttgaagtcttgccgtgcgtaccagaaacaccgattgaagtatgactttgaacaacttcttcaacagtatctgggtaagactgccacttaacatctttgtctaagcaagccttaacttctgggttatcttccttgaaggcatttcctttaacaattacttgctcagcattgctcttgatattagctggatcaaaattcttaacttcaattccaacctttttaagtggaacttgggtgaaagtgtatttctcgatgtcactgccggcaacattatagcctaagtcatgtaaaagcagtgccagggatgccattccagtacccttgattccaataaaccaaatttgcttatttttatctaacattatttgtccctcgaaatttcaacgtttttattcgttaattattttaccatttttcttatgctaaaatttttaaaatcaaaagaaatctatgatgaaaacgacaattatgttaatactgtcgatcatttgatcattaaagaccttacgggtaaaactatttcccacaaaattggttcactagctccttaaaaggtgaaactggtggcttttcttagacaaaataaaaaagttgatcaattagcttttttgcaccaactggttaactttttatttttgctttattcaaattataaagtaatttcaccactagcaatcaattcatcacacttagttggttcaaattctgcaccaacttcgaagctatcaggaacaaccatgatcccgcgcttttgtggtgcgtgtggcaaacctaattcacgagctgaacaaatcatgccgtatgaatcaacaccgcgcaattcacctggccaaatttgtgcaccatttggcattaaagtacctggaagtgcaacaactactttttgaccttgagcgatatttggtgcaccacaaacgatttggtgttcttcaccatcagcaacctcaacagtagttacgtgcaagtgatctgaatcagggtgtggttcacaagtcttaacgtagccataaactaaagttggcttgccatatgctaacttgtcagtaaaaccaacttcatcaagcttcttgttcagtgcaacaagctcatcgtctgacaacttaactggaccatttggtaacttatcaaagtcaactaacttatcaacgttgaagaagttgtaaccaatggtcttgccttcatcgttagttacgcgagtaacgtcttctttttcctcaaatgagctacggccttcatcgtgacctaagataacgatcaaagtgttaggataagcttctttattagtactagtaatcatgcttttttttctcctctattagtcaagtgatcgtaaaaagttttccacttcatctttagttttacggtccttatttactagtctaccaatttctttgccatcttggtagacaacaaatgaaggaattcccataatcattaatttttttgctatgtcaattgaaccgtcgcggtcaatttcgtagaattttgcatcagaaaaatctttttcaatttcaggcataaatggagcaagaaacttgcagtctgggcaccaatcagctgagaattcaagcacagtacgtccttctttagtaatttcctttaattgatcttcagttaattctttaatcttttccatttttcatacctcatgtatttcttactttttataagttgatattattataaccattctttaactaaaaagctagaaattgagtcttacaattatttcttttctttaaatagataactgccccaacgaactggtttttcaacagttggcaaaaccatgaagtaaagtaaaaacaaatacccaaatggaataaccgagatccagtaccaccaaccggtgtggtcagtatcatgcaatcttcttatggtaaagccaagtaagcctaataagatccaaataatcagtagatagataattatttgaataataagtgtaccagttgaaacgtgcgttaataagaagaattcattacttgaataagcaatgccatcaattgaatatgccgtagctgaacatgctgctaaaatgactagcaaaataattgcccaaacataggcataccaaaatccacgacgagtactacgtgcattctacttaaatggtgcagtaaacaaaagtttgaatgcttgtccaaaagttggtctaggaatatcagttttaggttcgtgatattcttgttcataataaggtttatcttccataattttccctccaataatctgaaatcttacagttctattctaaaacaaaataactaaagcgatgagctagtagcaagattttatccaataaagcattaaaaaacgcctagagtttatctgctgtaactctagacgcttcaaactattcatcctcaaaatgagcgtgcaaagcataaattggattacccttagctgcaaatttatgctcgtattctgtttcaatattcttttccacaatctctggcttttcatgatgaagatcaactgaaacaaaatcaaacttcattccataattattcaagctctgaacagagtaagcatacaagcccgcattgtcggttttaaattcaatatgtccttctggcttcagaacttgttcatacttgctcaaaaaactcttgtaagtcaaacgacgcttttcatgacgagtctttggccatggatcgctaaaattcaagtagataacattggtgctatttgctggaaagaagcagttgatgtcagccgcatccccgcgtaagatttgtaaattatccaagcccttttccaactttgttcgcaagataatccccgcagccgtagtttgcaattctaatgcaacataatttttatcaggattttgttcagctaacgtagtaatgaaatgccccttaccagaacctacttcaatttcgatgggatgatcattaccaaatcgttcagtccagtcgatctttttttcaggatcaggattttgcaaaacactttctggatggtcgtttacaagcttaacagcccaaggtttatttcttaatctcattctctattcctatctaattccaaaatttttttgattcatttttttaactctgcctggcaagtaagtggcagttacaatcatagtgaaaccaagtaaaattgccatcgcttcaaacaagttaacattaattggtagcacaattaaccagcagacactaatcaagagccattgaataaacaagcccattgtcaacacctctaccaagtccctgccacgattttgccgttcaattgggtaaacgcggtacatgaagttgcggtcaaactctgttgccattggcaataattgatagaccgttaaaaagattaccaagcatgaaaggcctagtgcccaacgccaatcttgcactaaccacgataccaagattgcaaagacagtcattctgactaataagttcaagtattctggattacgcaaaagtgatctccgatacaagaacaaattaggattttccttagccaatgattttggtaaaagaaagtcgaggtatcttctgcgtttgattgtaacttgcttttctgccacatcggtaaacatactgaagattgaataaacgcgatcttttctagcttgttcagttttaatcgcatagcgccagttaaagacgcccttttcttttttagtaccaaaatgcgtaattaccattaatactacaacttcaattggataaataaatgatcctagtgagccaatcaacaaagccgccagagttaccactaataatatccattgcggataattgtagtagaagtacaaactctctttttcaatcagcaacatacacaattttaataaaacagtgctgataatcaggattacatatgaccaaactgggattccagcctttaccgtcgcaaacggaaacagaattccgccaagcaaaacaatcagaattgttggcagcaccatactgtaacgaatcatcggcttcagatattcacccatttgttcatcttgcgtaaacagaaattgcatgtcggcctcttttaataaggtaactaatcgaccagctaataatggcaaccacatgataaagccgacaagtggcttatagaaccacagattattgggaattacgcgcatagcttgggcataccagaacatcagcgccccaaacaaaaagatcaacgctaaaataaagaagtcattaaacaccagcgtcaaatattttactgattgtttaagattctcgctcaaccttctattcgctaactcacgcattgccattatcctctctattcaaagcaaggtataacttgtcaaaaggatcatctggcttaaggccatagtgctgacgaatttcttgcaaactccccacaacttcgatcgtgccgcggtttaacacagcataattcgaaatcgcttgctgtgcatcagctaaaacgtgagtagtcattaagaccatctttttgtcagcaattgctttttttattaaatcgattaagttagcaactgccaaaggatcaaggccagtaaatggttcatcaattacaagcaaactagtatctgctaaaaaggcagagacaatcattactttttgccgcatccccttagagaagtgaatcggcagccattctagcttgtcatcaagtctgaacatcttaagcagctcatgtgcgcgtttccatgctttattttcatccaagtggtaactcaacatggttagctccaaatgttcctttaaagtcaattccggatacaaaatcggtgtttctggaatataagctacttcacgcttaaacttagttggttgctgcgtcaatacaacatcgttcaagctgatcttacccttttgcgggcgaagtaaacccaaaatatgtttaatcgtagttgacttccccgcgccgtttagcccaatcaagcctagtgcctcacccggcttaatttccaaattaatatctttaataaccgggacacccgtgtagcctcccgttaaatgttcaatttttaatgtcatttttcctatctttctttactgaatttatacctttattatgatagcatggatttaatagtaaactaaagtacaaggatatgaggttttattatggaaaatttagacaaagattgtttattctgcaaaattatccgcggtgaaattcctagctataccgtttttgaaaatgacgatgttaaggccttcttagatatttctcaagttaacccaggccacaccttaatggtgccaaaaaagcacatcgttaacttgtttgactacaccaaggaagacgcacaacgctatttacaatatattcctgaaattgctaatgcaattaaggcagccttccctaatgttactgcaatgaacattactactaataatggtaaggccgcaaatcaagtagttatgcactcacacattcacttcattcctcgttttgaaggcgatggcttgaagctgatgacccgcaacaacgctgacaaatacgatgaagctaaatacaacgaagttgctaacaaaattaaggcacaattttagaggttaaaaatgaaacatttcttattaggcacagtttttggtgcaacagctgggctagttttttcctgtatgaaagatagcaatggtaatcgcccaggcaagccattaaaagatgagttcgaagcaattaaacatgaaagccaacgctttaattctgccttgcaaaaagctaaaaaggctagtcaagaattaaatgaacaaatgccaacagctgaacgtacaattagtgatattaatgatagtgttgaacattattccgaccatattcaacctatcgttaaccgcatagaaaaaaagagcgataaattgaaccaagatttggaaaacatcgtgccagatactaactcacaagacacaaagaactaagaaaaaataaagaaaatttgatttttctgtgaaaattcgtaatttgaaaacgaaacgcccttttttatggtatattaatgaacagttacttatttaaggatgtggagatattatttttatgaagagttatatgaaaaaaattgctgcagtcgtagctgtagctggcgttgcattatcaactgctgcttgttctaatagcggcactaaggctactgttgcttcctacaagggcggtaagattactcaacaacaatactacgatgaaatgaagaagtcacaagccggtaagtcaactttggctaatatgattatcaaccgcgctttggaacaacaatacggcaagtacgtatctcaaaagaaagtcgacaagcaatacaacaactacaagaagcaatacggctcacaatttagtgctgttttacaacaaaacggtatgactgcttcaagcttcaagcaaaacattaagactaaccttctttctgaacaagcattgaagcacattaagaaagttactaagaagcaagaacaacaagcttggaagagctaccaacctaaggtaactgttcaacacatcttggttgctaagaagtcaactgctcaaagcatcatcaagcaattgaaagatggcaagagcttcaaggttttagctaagaagtactcacttgatactgctactaagaacaaggctggtaagttgccatcattcgactcaactgacactactttagacagctcattcaagactgcagcattcaagcttaagactggtgaagttacttcaactccagttaagtcacaatctggttaccacgtaatcaagatgatcagccacccagctaagggtaagtttgctgatcacaagaaggctatcgatgaccaaatttacgcatcaatggctcaagaccaagctactatgaaagacgttattgctactgttttgaagaaggctgacgtttcaatcaaggatagcgacttgaaggatgtattatcatcatacgtttcaactactaagtaacaaatatatttagttaatcaaaaacgccgaatctgaatggattcgacgtttttttatttcattaatttatttttttaataggggcatcatattcccccccagtaaaaaaactatgccctcactggcaccttcctagtagcagctgagttggcataaataatactttgaaattcattatgaaaagcttgagcattatgcaatacagctttataatcatcatttttagcaggtccaactaatccgccacctacaccaacaacataggcaccactagcaaaccattcatgcatatttcctaatgatacaccaccacttggcattacattaacatatgggaaaggtccatgaatttcagaaataatgcctttaccagcaattgaacctgggaagattttgactacgtcagcaccataagttaaagcagattgaatttccgttggactaaagcaaccgggcatgtaaggaaccgcatacagattgcattccttagcagtattttcgttaaaagatgggctaacaacgaatctagctcctgaaacaatcgccattctagcagttgcctcatcaagcacagttccagctccaatgagtatccaagatttcggtcttggatatttttttactacaaatcaaaaggctcaagatgcttcatcattaaagcattcttgagctctttaattttatttatcagtagcataatcagacaacttcaagtagcgtacaagttcactcttgaaagtctttttattataagtcactaccgcaattttacctttataaaagccagcatattctttttgtaaatcaccatggatatcacaattagccaatgaaactacccaagacttttctgccttagttagtttattcatgtttttaacccaaactttttgtccgtctaatttactttgatcgtatttaatttgccaactagcctgcttaactgccgcaatagaagtattcttgttagtcaataacttttgtgcgttatcaacggccaaatcatatctttcttgctgtgctttttcagtcaaacgatataaagtcgattttttaatttgacctgctcgatcaactaaggcttgcaactcaccatagtcactagcagtggcctgacttgcatctgcttgtgcttcgctcggtgtattatcaacttttaatgcaactggattttgacttgtcacatcactagctttaacaaaagtatttgctgtatctttagtttggtgagcatatgagccgttgctggtaatcgtagtaccagtcttgcctgttccatcaagagctggaacccagaccaattttttgttagccgtaagatgataatatagatcagcttgtttagtttgcttgttccaaatataaagagctcgatcaacgccaacattaacatctggaatcaataaataactcttatcaacgatttcaccgtcaatattatagagatacgttgagttaccggcaatgacataattatcttcagtagatgcagctaatgcaaaattatttggcataatccgagttgactttttgatagcaggtaggttgacccacttatcagtacctttaatccgataatattccagactactcaaataatcatcagcgccgtcaacattatgataatagttctgatcaactgtaagcttagttcccttcttaattggagcagcaattggcatccctatttgattagttactggagcagtctttttggtaattaccttaatttccttagttgacagatccgcatattgatattttcctggcgagattctaccaatgttgcctggcttaatatatttatttttgccaatattaacaaagtctgtcttcttgatgcttactgtcggtaacgaaaaatacttgccagctaatacattattgaagaaatacctgctttgatttgggttagtaattgccttaggcttcaatatagtcacctttagtaactttcccttcttaatcttgctcttggtacgcttaccttgatgattgtaaacataggcattgtggttaatatagaacgttaatttagtagtttgtgtattatcttgacttgcggcaacaactggattagacaaatgattatttgctaaaacaggtacagtcaacattatcgtagctgccgatactaaaattaatttttttgatgctttcatttttattccctaccctaatttttataacatctttagcaattcaatgcatcaaaaaagtccaagaggaaatcaatgtatacctcttgaactttttatcaataaaaaaatagaaaggagacaagtctctaatctatccaaaaacatctctgcttttcaattgtataaacatgttattattcttcagctaatttgtcaataactttgttcaaaaaattattgacacaatttttcaccaaaacaaaataagcatccctgcaaatcaaccgcagtgatgcttatttcttattctaaatgttccatattgcctaatgctagaactaatattatttacaatttcagctcaacacctttaatcaactatcacattgccaatttaaatttggaaagccattgctctctttctgaccaagaataaacaggaatattatagttcttaaaggcagacttaaaatcactagaaacaggactattaatattgttcgcaataactgaaaattctgttttaggttggctttctcgtacatcaataattctaaataaagggttagctatattagaattaataggcgtattcaccaccttaatagcttgttgcggtttttttcttgtacgtccaaccacaatatcaaacttagaattccgtccgctttttcctagtaaactcaaatcttctcctactggaatattattatcaataaaataatttgttacatcttctttaaaatacttaataacactatttttagaagtctgtaataaatcaaaagcttgcaacatacattgagttaacctattttgtgcatctggaaattgggctaagtcatcaaattcaattactaattcattattctgatttttcacaccaaaattaatcaaaatcgattgaaagtagtccctacgtttagattttctgtttaaattaatatctaataaccctaactcattaatagtatacccatcatcactaattatatattttgatgtatttccttgtgcaatcactaattctatataatcattgtacatatctaaaaaaggtgtagtgatagtcatataatcctgatttttagaagggacaaattgaatctttttatctatccagtcaaaatatattttcttcattttctctacatcaaacatatttaactgttctcccccctttctttaaaataaactttcctgttctcgaaaattatatgaatttatattatcaacattcaaaaactttaatgtcttcttcaagcattcacacaagttatttaaatcattctgactcaattgaaaattttcattcttttccaaaagtggtacagctacatatgtaccatattttggaaaatccgctctatgcaaatgaggacaaggaatgactttatttgaccatttaaagtctccaacaggattttgatgaggacgtccaataatatctactctaactaatggctgttccttatttctcttttcccttaatagaaaagtacatttaggacgtctatgtccttttctattcaaatcaagtataaaattataattatttccttttaaccttaattgactagaattctgaaatagcggcaaatcaatgtaatcattcttttctattatttgtttaaccgcctcaatcattttagtaatttcagcaatatccatcctttttactcccctataaattagatttattatactatgaaattataataaaactctagttcaatttttcaacaaaataagcatccctgcaaatcaactgcagtgatgcttatttcttattctaaatgttttgcgttatctagcgctgaatcgtgcatcggtcgataatatcgcttgccatcttgactcagtagtggctcggtgaactcgcctttaggcgtatgctgcagggcattcgttactgcataaattgcagcatctaaatcatcaattcggtgcaataattccgcttctagcaatgccggcaatttgggtgaaccatattcaaagcggccatggtgactaagcaccatatgccgcaataagagtaaatcttccgactccagattcatcttcatatcctgagcggccagcataatttgttcatcaattaaaaccagatgcccaaccaaatttccttcagtcgtgtattgagttgcggcagaacctgaaagttccagtacttttcccatatcatgcaaaatacatcccgcataaagtagcgatctattcacttgctcataattatcagccaaacctttggcatccttaagcatcgataaagtatgaaaagctaaacctccgcggaccgcatggtggttgcttttaccagcaggatgatcataaaaacgatcatgccatttttgaagtaaatacttcacaatttttgtccaggtcggattatcaatctgcatcacaaatttattaatttcagcttccatctcattaactggttccggcgctgatttaataaattgatctaattcatagccttcttgtggaccgaccacgcgcagagaatagatcctaatctgagggcgaccctgatattcttctcttttgccattcaactcaacgattgtcccagttgaaaaagttgctgcatcttgattgttagcatcccagtaattaccgcgaatctcgcctgagccatcactgaattgcatcgctaaaaacaacttattctttttattatgacgcaactgtgagtttctaatcaaaacaacaatgtccatttcttctccatcgttgtaatctaacaatctcttaagcatcctgtgttcctttcgtaaaagttaatggctcaatcccaagctgatcaactaaattcttttgagctgtgaaaattaaaacttgattgttttcgctaatcttttgcaataactgatcgatatagctgactcgctgatcatcaaagtttacaaacgaatcatcaatcaagattggcaaattaatttcatccttgatctgctcaataaaagctaacttcaaggcaaagtataattgctcagcagtcccccgtgacaagtattttacttcgcgctttttaccatcacttctgactactgttagcttcttatctaaattaatcccaacatatctgccgcccgttagcaaagctaagtattcctgagccgccttaagcatcttggggaaccgttcattagatgccaagtcaagcgagcgactgatccaccttgccgcaaacaagttagccaagtattctttactgctctggacaaaattggtttctgtattagccagatcctgcttagccttaaacaccgcagtagaatcagctaaattgtctaactgcacttgcaactgagcaacttgactctgaagttcattaatttctgcattcttagtactaatttgttcagtcaaagccgttaatttatctgctaattcggttgaatttgtctgcatttgcagctgttgaagatcatcgcctaacgattccttcaaggccgcaatctgcgtcttcagtttagcctgattaagtgaatcttgataaagctgatcgtaacctgccatattttccacattagcttgggcaaaaagtgcctgtaatttcagacccaattctttcaaatcttgcttgtcctgctttagtgatgcagttaagctggattttctttgaagcaattcttgtttttcactaatttgtgtctcaagttcgtccaaaccgttcaaaacttgactaaagtcattatcaatcggttgcttcaatgcattttggacacttgaggccagttgagccacattctgattcaaaacagttacttgcttattattagtctgtgcggcattctttttgatttgatattggttcagattagttagtaagctatttaagtttagcgtatcaggattcaatccatattttgtttggaaagcttggcgtttttgagcaaccagcttttgcttttctaatactgccgcattttgcttattttggttactattttttaagtatcctgctgctaggaaaattagtccagtaattaatgcaattacaccaactgtacccaacgctaccaaaagaactacacctaatgccgctaacactgcaccgataacataccaaagcttgtcattagtagttacataagcaggctcattgacagcacctggcaaagcttgatagtctgcctgcatttgttcaatttgctctggtgtcaacttgagtagattttttaactcaggtgtcaaagctaatagttgctctttctcctgcttcaattggtcagccttttgcaaacaattacgatattccgcttgccactgcaagagttgaggcttctgctggattagcttcttctctagcgtaaaatcagactgatcgttttcacccaggccctgcaactgcgcttctaccgattgaatcgtcttttgcaaattacgtccctgagccataatatcttgggctttttgataattttgaccattaaagtcgacatccttgacctgtttttgcaaatcaagcagcgtctgataattgcccatttctttttgcaaatcatgcaaatcttgttcttgtttttgtaaaacagccagatcttgtttttgtctgtttaatgccgctcttttttgtacaaaatcttggtgcagctgttcataatcattaaactcatttttagtctgcgctaatttatcacgttgatcagtcatttccttaagcagacggtttacttcgggctttttacctgtctttttaaaaagcttacccgtttctttggcaaaatcgtcgcgcatttccagcaacttgctagaatctgctgctcccaagtaataaattcgctcaagcaaatcctcttgacttaaactgttaacctgacccagcatttcttggttaaaaataaaactatcagcgtaaaaagagccatcaatattttgaatttgatcaaaaaatacactctcaggtacaacttgaccatcttttttgacggttaaaattccctttttagtcttgtcacctttagcatagagtcgctcaagttcgtattcaccatcagctgcagtaaaaactaaattaccgcccatcggactaacatgagctagcggcgtataatcttcaaaaaacggtgaagagttacttctcaaatgaaagccaaataagatctgtttaataaaagctaccgttgtacttttaccagcttcattggcaccaaagaaaacattaatttgatcactaggcaaatcgaaggttttattcgagaactgcccaaagttaataatcttaatttgtttcagtctcatccttaattcctttcaatttactcattagttttacttctgttagattcttaaccgccgcaataaagtctggatcagccgctaatttagcagcttctggatcctttttttgccagtcactaacaatttgcttgaattcagctggtgcaaataactcttctttggcagcttggaaggcttgttggtcattgtcatttaactttaaactagtattcacaacaaagcgcacatcaactaactgagaagcaaatggcagcgattgagaaatagtttgccaaaaatcaagatcctgaactaaatcgcgttcttcggcactcaaatattgagcaccagcaatcgtcaaactaaagtacgttttttgtccagattcaagcttggcaataattttcgcttgtaagtcagctttactgatagctccttcaagattaatttttgtcccttgccataaaattggccctgtttctttaaaatcaatagtagtcttaccactattttcatcaatctcacctagatagcatcccttggctcccatctcattaatgtggcgaccttgaatgttacctggataaacaatccacggcgtactacttaaattatttctcgcatgaatatgacccaaagcaaaatagtcataattcaagttttgcaactcatcaactgtaaacggtgcatacacattctgactagcagtagctgatttctcttgagcatgcattaaaccaaaagtataattttttccttttgctgggaattctgggattttatcctcagtgatatggttattcagatatgaaaagccgattacgtcatagttaaaacccgcatccgtagtaaaagtagcttgctctactgtttcattattgcctaacaatttaaagtaaggactgggactaactagcagatcttcttgcttcatgtggtcatgattaccaaaaatcatcactacctgaattttttggtcagttaatcgcttaatttgcttggcaaaaaatagctgagctcgtggtgatggcgtattactatcaaaagtatcaccagcaattaaaactaaatcgacattttcttgcaaggccagatcaacaattttagttaatgattgatcagctgcttgatagatatggttaaattcctcagatggcaaaaaagatagcccacgaaatggactatctaagtgcgcatccgcaaagtgaataaatttcatcgcgaatattaatttctaagatcttcataaagatcattaattggcttagtgtaagctttttgtacttcaccaagcaaatcgtacaacccctgttcattcgtaagaagtgaaacaattttatcattcttttgaacttgatcatttaagtccttgtaagcttgttgatcttcagctgaaagtggttgaccagcttgttgtgcttgcatgatcttattttgcaattcatccatctttttgaataaagctgaagcatccttatcatcttcaacagctttaattgcttcttgcaacttcttgtattgatcagtttgagtcaaatcttctgctaacttgttagcagcatcgtaaatgttaaccatctagtcctcctaaattttattggccaaataagcctttaaggctattataccattcattgattttctgtcctgcagaaccgagtccatcttgaattttttcacctaatccattagtccagtcatcattagaaccattattcttcacaatctggttaggtgccttctccgtgaattcagtttgcgcggtgtacggcaaaattccttccatctcagccttatataaacgcgtaattcctgtttcagaaatgccctgcatgtagtgttgcttgttagtgtggtcaaaaccaacccaggtagcaagtacaatgtcaggcgtataaccgacgatccactggtccttggtaccaaatccatatgagttaggtacttcagttgacccagtcttcccagctacacggaagccatttggctgagcagagcgtcctgtaccattagtgaaaacgccgagcatcatagtcgtcatttctttagcagtattttcagaaataacgcggtggctgcttggattattattttcggctaaaacgttacccgaagcatcagtaattttggtaataaagaaagaattattaggcaaattacctttgttggcaaaagctgaatatgcacgtgccatctgaattggcgaaacacctgaagataatccacctaaggcaagcgctaaattacggtcactctttggtaccttaattccaaagttttcaacagattgcacgcctttacttacaccaatcttatccaatagccaaacagctggcacatttttactttgttctaaagcttcatacattggaattgtattagaatagccattgtccacattatgcggttcatagccatttttaccaaatttctgcaacttgttcgatagttgcgagtcatagtgatagccattttgtaaagctggggcatatactgccaacggcttgattgatgaccctggctgccgcttcatctgcgttgcacgattgtaaccccggaagacgtgcttaccgcgaccaccgatgattgcccgaacagcaccagtacttgggtccattgccacgctagcgccttggctttcagttccatcactaccattttgtgggaaaagccagctttgctcaaaagtatcctgcaatttaccctgataattttgatttaaagtagtataaattttaagccccttattcatgacttgttcttcagttaagccatatttagagattgcctcgtcaactacagcatcaaagaagtaaggatagcgatagccgtttttattttgaaaagtattccgcaaagttaatccttgcttttgatacattttagcttgagccgctgtcaacttattattatccaccatcaagtttaagattaaatttcgtcttgctaaagcatttgacatgtgatcaaccggattataaaaactaggatttcgtaaaattccagctaaagttgcggcttcactcggattaagttcacttgcgtttttgccaaaatagcgacgacttgcatcttgcacgccccaaactccgttaccaaagtaagcattattcaagtacatcgttaaaatatcttttttggagtaaacatggttaatttcaattgcaaaaaagagttcttccaattttcttgaaaaagtctgctgctgggtcaaaagcgagttcttggctaactgctgagttaaggtcgaaccaccaccagttacttgaccgtgatgaatcactaaacttaaagtagctcgcgccatgcctttaatactaaaacctgggttcttccaaaaagtccgatcttcagtcgaaattacggcattttgaatattaggcgaaatctggtcatattccacaaatgatcccttttgcgagtataaagaacctgcttttttacccttgtagtcatagattgtagttgtggttgaaagcgaggccttcaaattagctatgtttgatgtcttaactttaattgtataataggtacaagttaagagcatcaatgtgagcaggattaaaataatccagcgtccgataaagaagcgactatcaaatcgatgccaagcatctttaaagccacctcttcttggttggtcgttattcattaaatattgctcctttttagaaacaagaaaattgtaccatactatcaaaacacgtgtttataactagattagacttaagaaattattatgagtttccgttttacacttttttacccagaaaatcttgctccggcatctgtcaatgaagtactacgtcaacttttaatccctcgcaagtggcgtcattttttgcgaattgaacaaaatattttagttaacggcaactatcgctattttaatcaaaacattttacctggtgataaaattgaaattaacttggatcatgttgaaagtgatcaacaggcttatgcaccaagcggtaagatgcccgatgttatctatgaagatgataatcttttaattattaataagaaaaaagggcaaaaaacgcaccctaatctaaatgaaactaatactgctctgaacgattgtactacttatcttggtcagagtccctatattgttcatcgattagatatgttaactggtggtttacttttaattgctaaaaatcctgcagttgtacctattttaaatcgtgaattaaccagcaaaatttttcatcgcgattatttagctaaagttatcaatgctgatcacttagctgaaagaggtacgattaatgccccaattggtcacgatccacttgatcaacgcaaacgcaaaatcgatcctactggattaagagcagttactcattatcaagttttacaaaaaaatgatgacaatactgcgattgtcaaattgacgcttgaaactggtcgtacacaccagattcgcgttcaccttgcctctttaggaagtcctattgtaggcgatcctttatataaccctgattttgccagtgagagattagccttagatgcttacgaaatttcattagttcaaccttactcttttactaaattaaatgtaaaattgcccaaaaacaaaattgaactctaaaaaagcctttgactgcaatactgcaatcaaagacttttcatcaaattataaattttaccaattatattcatttggatcctttttacctaagccagttgtatgatcaaggaggatcctctgctcataatgagctacatttagcttagtcgccttcaccatgtcagggttaactgatacaaaatcaatgccacttctgactagaaattcagtaaattctggatattctgatggtgcttgaccacaaatcgaaaccgtcttaccatcttgatgagcaacctttatcaagtgcctaatcgcccttttgacggcaagatttctttcatcaaaaagatcagcaatcacatcattattccgatcgcaccccagtaaaagcatcgttaggtcatttgaaccaattgaataaccatcaataaattgattgaactggtccgccaaaataatattagctggaatttcagccatcatgtaaaccttgaagtctgcgcttctaactaaaccttgtgtccgcatgatttccgtcactttgcgcgcttcatccactgttcggcaaaatggaatcatcacatgtaaattctttaatccgaactcatcgcgcaccttttttaccgcttcaagttccaatttaaaagcattaatatattttggatcataatatctagaagcaccgcgccagcctaataggtctgctggttcatgcggctcatatttgtcgccgccctttaagttgcgatattcgccagacttaaagtctgaaaaacgtaaaactactggccgtggtgccattgcccgcgcgactttaccgattccattagctagctcgttaactaccctctctggatgaccagtttcaatcaaataaaggggatgctggtgaatataagtcgtccataaaaattcttcgcgcattaaaccaatcccatcagctggcaaagatgcatatttttcagcaagatcaggatctcctaagttcatcatgactctggttgcagttggtgggaaatattcaactgcagcaggctcagctggcttttcatcgacttttttaaccgcgtctttaacaactccagcataaaccacaccatttttagcatcgacggtgacagtctcgccgtttttcaaagttttcgtagcagcttgtccacggctagttgttccaactaaacaaggtatctgcatttcacgtgatacaattgcagcatgacaggtcattccaccattattggtaataattgcggccgcctttttcattgctggcacccaatcaggcgacgtcattagagtgaccaaaacctcgccctgcttaaattcattgatatcttttggatcatcaataatatgtaccttgcctgagacaaaaccaggtgaagctggcaagccttttaacaatactcggtgttctgtagttgcttcttgtggtgcatcggttttctcctgctttttcttttgtgaccaaacagtttctgggcgtgcttgaactaaccacaacttatcattttgatcaagtgaccactccatatccatgtagcagccataatgtttttcaatttctttagcataaccagctaattcaatgatttgcgcatcagtcaaagcaggcttattcacttgatctggtgctaccttttgttcaattgttcctcccgatggcaatctgatcaactcaattggctttttagtcaccattttgtgtacaatcttcatcgtatttttatcaactacatagttatcgggtgtaacagttccagacaccacgtattcgcctagtccccaagaggcctcaatcataaccttagtgtcatcaccagttgctacattgaccgtaaacatcacaccagctgctttagaaaaggccatcatttgaatcgcagctgataaagcaactttttcttgtggaaagttttgtttaattcggtaataagttgcccggtcggtgaaaagagaagcgtaacattcttgcacctttttcaaaacattctcacgaccatgaatatttaaataagtatcttgttcgccagcaaaactagcatcaggcaggtcttcggcagttgcactagaacgtacagcaacgaatggctcattttggtgcatcttttgggctaagctatcgtaagcacagctaatttctaaggctaaatcatttggcatcggcgcttctataattaattttctaattttggtgcaaattcgatgcaattgctcagaatcttctggatcagttaaagtggccaataatttatcaattttttgatttaaatcagaataattcataaagtggcgataagctatggcagtagtcgcaaaaccatacggaaccgggacattcgtttcagaagtcaactcacctaatgaggatgacttaccaccgactaaatcaacatcatcgcgatgcaattgatcaaaccacaaaatataattatctctattcatgcttgttctcttttcgttaacgcacaactaacatttcatttttagctgctttatttaaaaccacgaaactgtcaaatcttttgtgtaaatagttctttctcgtaaattgattttttaattatttatttaatcaaagtaggattctaaggtgtcctgaacctgaccaaagcctttatgaattcgattgaaataacggtcattgtagctcattgcctgaataccaataaaagcatcaagcgactgttcagttggaaactctgccttaggcttagctttgcgcttgatcacattgttaaatgattcaatcatgttagtcgaataaattgaagctctgatctgcttgggatagttataaaagaccagcagatctggttctatgtctttcaagcttctgataacatggctgtaaaccttgccccatttggtatagaagtcatgcaggacagctgtggcttcttctttgtttgtctgttgatgcacctgtttgaattcgttcatgatcttttcacgatcgtcgacgcgtactttagcgcagatattgcgcatgacatgaaccaaacagcgttgaaaatgagctttaggataagtcctggccaaggctgttttcatgccaacaacaccatcagaaagaaagagttcaacttgcttcaagcctctggacttcatgttttgaagcatctctgtccagacttcaatgttctcactaggagcaatgcagtagtcaatgacttccttatgtccattaggtttaatgccaatggcaatatagactgcttcacgctcaaacgtttctcggcgcaaaggaaggtatgtcgcatccaaatagacgcagaaaaacttgtcgcttagcttgcgtttgtggtaagcctcaacctttggaatcatctgcttggaaatatttgatacctgagctggactgtaatggctgccatacatcttttcaattagatcggctatttccctggtggtcacgcccttggagtaaagcttgataatcatgctttccaagatatccgagtgctgcttgtagtcaggcagcgtgtgctgatgaaattgaccgttgcgatcccgaggcacttgcacttcaattgggccaaattgcgtatcaactttgcggaaataagcaccatttctagagttgccagtattccagccatttctggcatagggatcatagcccagaaaggcagtcaattcagcttctagcaagttattaacagcctgttgtagttctttgcgcaataaatcatttattttgtctggattgaatagagcttgagcaaaatctttggtaaaatcattcatgaaggagttcttctttctgtatgtgttttttttgttcaaaccaatcatacgagaaaggaactcctttttctaatgtttaaagaaataaatttaaggaatcattcatccttacacaaactattttacagtctcaaaacccatctttagcgggtgctacataacttaaatatttcaagttattatcaacagcagacatttttactatcccgcaattatcatattctttaaaagttggatttactcgctgcgtaaataaccttaaagccgtcccatgtccaacaatcaaaattgtatcgttggcatgggttgaatcaatgattttagtgatcgctcgttccattctttcttcaacatgttgatccggctccattgcggcattaatacggctaaagccacgtcgccatggcaacatgaattcatcttgtccttcatattcaccatgagatttttcatgcaggtcacgcagtcgcgtataagacaattgattatcagttataatttctaaagtatcgcttgccctttcctgctttgagcaaaatgcggcatcaaaactaatttctttttgcaaaaaatacttccgcaccgctgtcgcctgcgctttccctaattccgtcagaggagaatcacaagtaccttgtattttatgatgcacattgaacaaagtttgcccatgtcgcaccaaatatattgttctcattaactgctactctctttccttttatgcatattaattgtgaacaactgtatagtaccacaatattttgaaagcgcttaaagttatatattaagtatatataaagctatataccaaatttgtgaaattaatataatgattatgcatttatttgtcaaaagtagatttggcattatctagggcttgttaaataatgttcatatttggaacggtctaatttattgagttgctggataattagaaaattgtgatgattgcagccaaatagtaaatctttttaattaatttaaaagttagtgttttttaatgctattttcttgcttttttacaaaaaactatatctatttttcgagttaagagtataatttttggttgtactatttttcacttattttttctactaaaggagaagaaagtatctattatggaacatacttggttaatgaagtattttgccgaatttttcggtacgattattttagttgttttaggtaacggatcagttgccaattctgtactacgtgataccggtggtaatagccgtgacggtcaagccaatggtgggtggctcttgatcgccttcggttttgggtttggagtaatgctcccagccatgctcttgggttcaatttcagggaaccacttaaaccctgctgttaccttagctcaggcttgttcaggcgtcttcccatgggatcaagtaatgccttacatcttggtacaaatgcttggtgccatcgtgggacaactaatcttagtagccgtctactggccttacattggcagaaccactagtgatgatgctgtttttgccagttttgcgactggtgattcggctaacagtaagttcaacggttttattaccgaattctttggcactgctattttgcttttcatcgcagttggtttatatcgtggcatgttcttcaagcaatctgaagacattgctaacatcggggttggtttcttaattactgctttagttatggcagttggtgggccaactggaccagctttgaatccagctagagatctaggtccaagaattgtttatgctttatgtcctttgccacacaaaggttcagcccactgggattacagttgggtaccagtggttgcaccaattgcaggtggaatctgtggtgcattattatacaaaattgcatttggattataagagatctaatcaaatagtaaaaaaagcattaagctatctgcaatagcttaatgctttttcaatactcggtatctaaacctaaatagaaaattgaatctacatttttagtttcattatccgaattatcttttaaaaaaatttgtggtatatctccaaaagtcggattaaaaggatttttcattttaaatctctttaaatctaaaatagagtagagggagttttataactcgcccctctcattgcaccggacgtacggttccgtatccggcgctacgtttgtgattatttacgagataaataatattctagcggatcgaccaagcctgggcgatccgctttgcttatgcccaatacttttgggctaagcagaaagttaatgacatgacccgtacttcttttataccaacctaagcgcgtattagctactttatgaatatcttcatcactaaaattgcactttagtgccttgttaatccgcattaagttaatgtatattcgttttggtagtttccattgtttaatgattaccacccgtactttatgacgcagccattgactgaacttaattagaaaatatttcatgtcgccaactctaaagtaattgacccagcctctaactacttgatttatcttagtaaagactagtgatagaggctgagcagctgcttttctgcgacagagaagttctctcatcttgtcataaagcttgattttgcggtcatctcctggctttgcttgccagtattcgccacttttccagaaggtaaagccaagaaagttgctcttggttggtcgtacaactttggttttggttgcgttgacctttaggaatagctttctttctagccatgatgaaattgaattcatcacacgtttggctgatttaccgcttttgacaaagatattgcagtcatcggcatagcggacaaagcgcaggcctctttgttccaattctttatccattttatctaaatagatattggatagaattggtgaaagagggtcgccttgtggtacacctagtttattaggcttaacccaaccatcttccattactccagctttaagaaaggctcgaattaaatggagggtggttttgtcatttacttgctctctaattattgaaattaatttatcatgatttaccgtgtcaaagtatttctcaatatccaggtcaacaacccattgatagccttcgtttaaatattccaagacttgttcaatagcgtcatgagcactgcgtccaggtctaaagccatagctatgctcactaaaatgaggatcatagatcttcattaatacttgggcaatagcctgctggattactcggtcaacaaccgtgggtattcctaaaggacgtttcttaccattagctttaggaatgtagactctgcgaacagcttgcggacgatacttcatcttcatgatggcgtcctttatttctacttgatgctttttaaaatagctatcaagctcatcaactgttctcctgtctacaccaggcgctcccttattgattttgactctcctgattgcttccctgagattgttttgacttaaaatctgttcaattagttccatctcgtgatatctccatttctacttgtaaatttattcagaattgtcccaattgctttcaccatcaaagagttacgttctctttgtgctaggctatcctcttatccggactgtctgaacattgcttatagcgagatatgctcttacaaacattaggcccttcgctccagtttcattacaaaaccttcagcactactacgacctcagctgacttctcgcgattaacctttttcgaccaggcttacgatcgctgatattaaagcttactcggtttcacctgtccacgagatctctcggggtaagacattcatctttaattttccactgccccctggtttaccgtcttggttttacggttgtcctttggactttaacttgtgctgcagtctcatccaccatttggcctgaccaggtttctgtacgtaggctcggaaaactcgctagccacttccttcacccatagcgtcaccgctaacggcttgtggttcgctacacttggcgacaactacccgtgatctagactttcactagactaaacaaatgccatgcccgacacacagcaaaaaaactgtctagttcttaactagacaatttttgcgttaaataatcccacgctgcaacgccataaaaattgtaataatcaataaatctgcactgccaccaaggctataatttttctctttaaaaatctgatttagttctaacataaactgtttaccagcttgagtaccgtagccacctaatgccaaatatttttttgcttgattatgtgcccaagaaacaacctcaatatttcccgctctttttattaaattcgagtcttcaatcgcactaactattttcatcaacgtatcgagtaaacgaacattcaaatcaccttcggtttgagctaaaaatggcagtgctacatccctcaccaaaggataaccagcttctgcttctgctctaactccacctttaccatattgcaaaaattgtttttctccagcagtctcattcctcttgcctaaatcgtgctttactaagcccttagtcatctgctggatcacttcaaattcaccttgattattattttcacaatagctacttgcacagccaaacaaccctaacgaaaaaatcgcgcctttatgggtatttatattatgcgttgtcttaaacattgctttttctgcctcaatgccagcttgacgcaattgttcaaacatttgccgcaaatcctgccccgtaaaatctgctccaatcttagctgcttgccgaaaataattttctaaactcaaactgctattaataaacaaatacacattcatatcaggatgagaccccacgtcaactggatccactaaacctggcttaggattggtaactacttcataaagcaatgcttttagtgcgttttgtgtgatcttttctactgacattttgaccccatttccaaaatagctaaactaattttaacatgattatcctttcgcctaatttaaaaaaatgacacaataatattaggaaaagaagagagcaagttcatgaaaacagatcaatttaaaagctatcaaatagctgatattggcgattatttaaaagtattcgcctgcagcgcagtaatctcacagccaattatgtcgctggtcatggacgtagaacaaccggttcacacacaagatgtttttggcgttttttataatttagtcaaatatacggctccagcttttatttttggtattttgtataccacaatccgtactaataatgaaaaaaatagtttttcttatgcaaaacatatgcagacaaattggtctaatctttttgtacctactatttggtggacgttaatctacctagtagggatgccatggctgcaacaagttaaccattttaacaatcttggttcattctgctggcaattcattaatgggaacgccgccccgcacttgtggtataacacgatgatgttgcaattcatcattttaatgccgcttttctggggattaagccgctatgtaggacacaatctaactcgaggtatttggattgcagtaatcactttcgtactctattttgtctggctttggttctatgattacaatgtcttccatggcatgcacgaacatgactggtatttactcgaccgcatttttatttcattcttcatctatggtgtgtatggtgtcttagcatggcgattgcgtggttattacaaccagctggtcactaagttttggtgggtaattaccatattatttattgcttgcttcatttggactaatgttgagttgcacaagttcggttatccaatcaacttcaataatgcaccatattacaagccgtcaatgactctttattgtttagcagtaattgcactgatttcagctttttgcctgcatcaagttagaaaaaattcgcaaaccagtttaaaagtattccatttcttggctacttatgcttatcgcgcatatttatccaatgtcttctggaatcaattagtttggcgcggtcttaacatgcaatatcacgccatttaccacccattcttaactttctttggaatcttgctgttaacctggatcttgtcattcacttcggcttattgcttacacgtttggtggacgaaagcgaagagtttaattagcagcttttttcgttaattatcaatttcatataattcttctgcttctaacaaaaagtctttcatgaatggcagagaaaatgccactttgccatatcctgcatcaatgattacctgactatccattaatcgctgccgatattgcgaaatataattagaactttttcccatttgcttgcgaatatcacttatattaacaacatttttatcattatgagccatgatgaataaaaattttcgatcgactggcgataattcagagataatcttgatataagcattacgaaacagatcatttttaaacgatgagatcgaattttcaatactttcatctgttacctgatcagtagaatgttgccaaacatgatatcccaagtcttgaaatgcataagcgtaacctctagtcagcttagtcattttcattaaggcagtattattaatctctttattacctctttcaaatgctttttgataccgatacttaatatcgaaaagatcaagtggtcctaatggtacacgaccgcttcttaaaagaaatgttaatacatcattattttggagttcagaaacattcttaggcagcccagtcatcatcatattaattgaatacttttttaacaccataatttgatagatagacgccaaattaacaatctcaggagtttctttaacctcatctattgctatcaataaagattggtgatgcttttttaaaacttttaacatttcttcaagtaacacttgataagtagattgaggatttgatatatgaacttccaattcaaagccaaaagccgaaaactttacaccatcaattttgttcaacgccttttttactggattcgctgcttcttgataaatactttggatgagcgtggcaagcaaatcatttgtcatggctaagtaaataacaatccagttatctttttgttctaaagttgaggtaatatcagcaagtaatgaagttttaccaaccccgcgcatcccatagatcattgaagtttgatagggtccggtgccactttcaagtgatcttactatatcttctactattttttgtcgccccaaatatattttgggaactttgccaaagttagggtcaaatggattcgttatttcagacataattgatgttcacctattttcattattttagttgttggctttaattttatatctctttagatcttatgtccatttttatatctctttagatcttatagttataaaaaatgctcaaaaaattttgagcattaccattttatgagttatcgaaaaactatctcattaataaaaatttatatagtggcattaactgaattatcttatcttcttgctgaatttcagcctcttcaccatgagtaacgattattaagttttcaacttcatcaaaattatcagctaatttaattaggttcccaacttcacgttcttttgacgtatcatttacttcccatgcaacttgaattgcaattttactagctggtacataaaaatcaatatctatccctgtcttttgagattttaaataaaataaattctcttgatatttattatgcaacttgatcgcaactagattttctagtaatgctggcaatttatccagataaaacaaatttaaaatgccattatctgtaaaataatactttgggctgctttcacgctcactaaatttagcaaaataatttttggtggaaaataacaaatatgcatccttagcgtaatcgatataatcaataatcgaattgcgacttaccgtactaatcacattttttatatttttatacaaagttgcatatgaaacttgagactgtaaaatagtttgtgtaaggatgaatgattccttaaatttatttctttaaacattagaaaaaggagttcctttctcgtatgattggtttgaacaaaaaaaacacatacagaaagaagaactccttcatgaatgattttaccaaagattttgctcaagctctattcaatccagacaaaataaatgatttattgcgcaaagtactacaacaggctgttaataacttgctagaagctgaattgactgcctttctgggctatgatccctatgccagaaatggctggaatactggcaactctagaaatggtgcttatttccgcaaagttgatacgcaatttggcccaattgaagtgcaagtgcctcgggatcgcaacggtcaatttcatcagcacacgctgcctgactacaagcagcactcggatatcttggaaagcatgattatcaagctttactccaagggcgtgaccaccagggaaatagccgatctaattgaaaagatgtatggcagccattacagtccagctcaggtatcaaatatttccaagcagatgattccaaaggttgaggcttaccacaaacgcaagctaagcgacaagtttttctgcgtctatttggatgcgacataccttcctttgcgccgagaaacgtttgagcgtgaagcagtctatattgccattggcattaaacctaatggacataaggaagtcattgactactgcattgctcctagtgagaacattgaagtctggacagagatgcttcaaaacatgaagtccagaggcttgaagcaagttgaactctttctttctgatggtgttgttggcatgaaaacagccttggccaggacttatcctaaagctcattttcaacgctgtttggttcatgtcatgcgcaatatctgcgctaaagtacgcgtcgacgatcgtgaaaagatcatgaacgaattcaaacaggtgcatcaacagacaaacaaagaagaagccacagctgtcctgcatgacttctataccaaatggggcaaggtttacagccatgttatcagaagcttgaaagacatagaaccagatctgctggtcttttataactatcccaagcagatcagagcttcaatttattcgactaacatgattgaatcatttaacaatgtgatcaagcgcaaagctaagcctaaggcagagtttccaactgaacagtcgcttgatgcttttattggtattcaggcaatgagctacaatgaccgttatttcaatcgaattcataaaggctttggtcaggttcaggacaccttagaatcctactttgattaaataaataattaaaaaatcaatttacgagaaagaactatttacacaaaagatttgacagtttctgaaacttggtgcattactgtatcggcaatttttctaagtaataatgaaatcgtcttttcattacgaatcttattgcggacaatgatatcagctaaaaatacattttgataaatacttgttaagtaatttctcttgtctgttaagataatagattctggcaacccaccataacatagatattcatttgcggcagcacgaatttggccattattaactgtatccaagacggataatttatcatgtggaatttttttagcagttaaatattctgtaaaactaaaaggtgccacatatttggtcatatatcttccacccagccgcagaacaatatcatgacccaacaccttagagttactaccggttaaataaacactttcaccttgatctgctaaacgacgagcaaatttttcccagccagcaatattttgaatttcatcaaataaaaaataatgcttcttagttgttaattgattggctgcaattaagatattattacaatcagccaactgaaaaccatctaatcgttcatcttcaaaatttaagtaaacaatttgtgaccaatccacattttgtttattcactaaatcctgcgcccttttaaataatagcgttgatttgccagcccgccgcaaacctactaacacataatttaaactattttcaaaatgataatcacgaggaataatagcaatatttttaatattattctgaccttcaagaataagtgccgcaagtaaatctggattcatgtttgaaactgtcaaatcttttgtgtaaatagatctttctcgtaaattgattttttaattatttatttaatcaaagtaggattctaaggtgtcctgaacctgaccaaagcctttatgaattcgattgaaataacggtcattgtagctcattgcctgaatgccaataaaagcatcaagcgactgttcagttggaaactctgccttaggcttagctttgcgcttgatcacattgttaaatgattcaatcatgttagtcgaataaattgaagctctgatctgcttgggatagttataaaagaccagcagatctggttctatgtctttcaagcttctgataacatggctgtaaaccttgccccatttggtatagaagtcatgcaggacagctgtggcttcttctttgtttgtctgttgatgcacctgtttgaattcgttcatgatcttttcacgatcgtcgacgcgtactttagcgcagatattgcgcatgacatgaaccaaacagcgttgaaaatgagctttaggataagtcctggccaaggctgttttcatgccaacaacaccatcagaaagaaaaagctcaacttgctttaagcctcgggatttcatgttttgaagcatatctgtccagacttcaatgttctcgctaggcgcaatgcagtagtcaatgacctccttgtgcccattaggcttgatgccaatggcaatatagactgcttcacgctcaaatgtttctcggcgcaaaggaaggtatgtcgcatccaaatagacgcagaaaaacttgtcgcttagcttgcgtttgtggtaagcctcaacctttggaatcatctgcttggaaatatttgatacctgagctggactgtaatggctgccatacatcttttcaattagatcggctatttccctggtggtcacgcccttggagtaaagcttgataatcatgctttccaagatatccgagtgctgcttgtagccaggcagcgtgtgctgatgaaattgaccgttgcgatcccggggcacttgcacttcaattgggccaaattgcgtatcaactttgcggaaataagcaccatttctagagttgccagtattccagccatttctggcatagggatcatagcccagaaaggcagtcaattcagcttctaacaagttattaacagcctgttgtagctctttgcgcaataaatcatttattttgtctggattgaatagagcttgagcaaaatctttggtaaaatcattcatgaaggagttcttctttctgtatgtgtttttttgttcaaaccaatcatacgagaaaggaactcctttttctaatgtttaaagaaataaatttaaggaatcattcatccttacacaaactattttacagtctcggattcatgttttgctcctatgtaatttatattaatcaaaataattataattttgtttaatatattaagcaaatattgcgtatttagagttagtatatttttaaattaaaaaagtccagctttcgctgaacttcccttcatttcttcttcggcacaaaggcaagagccaagagcaaattaataattatcaaaatcagtaataccataaatgtccacttagaaccgactgctgtgccattagtcagatatttattctgcgctagcgcaatcaaggtctcagctaaagctgttcctaaagcacctgaaaattgctgcaaagtattaaaaatcgcattaccttgtgcatgattttctttgcctaaagtgatcaaaccgctggtcatcaaactgccaaagcacatcccgtatccgccataataaagaacgtataacaagacaattgccaggttgcttaatggggctaaaacattcatcaaaatcaaactagcgattatccccataataatcggcagccgcgcaccctttttatcaaacagctttcccgctacagccgccattagcgcgttaattaccgcaccagggaaagtaacccagcctgctaatgaaacagaaccatgattgacagcctgaacatagattggaaagatgaagcccaaagctagcgttgcaattttggcaaaacaataagctattagctgcatactaaagcgtaaatttttaaacagtttcggactaatcaaagccgccttatcagaccaagatatttttagccaaattaataaactaataattcctagaattaagaagcccaaaacttgaattgagaaaaatgaatgtttagcaatccgtgtaaagcccagcattaaacagaccagcccaatagccaaagatagccattgcacatacttgaacttcactttttcaagcggattaatctgccgaattgaatagcttcccgtaaatagactcaagataagtcaactaccccagaataaattctggggcttggtggctggctcgttagcttgcgctaaccagaacaccaacttgcttagatacggacttgacttaccaacaataatcttttgactattgccgatagaggtcgtctaattaccaaagccttttgagtccgcgagttgcgagcggactgcagcctagcttaggctgctttttttattttagaattctgccagttgcctaagcctttttctaagatgtttactgccgcattccaatcacggatatgatgcgtttgacagattggacaagtccattctcgatccttaagcgttaatttcttataaccgttttgtcccataatactgccacattgatggcatctttgggtggtgtacttaggatcaattgttttgaactctttgccatataggtctgccttatatgccagcatgttcagaaaactgcgccagccaacatcagaaatagcttgagacaaggcatgattctttaacaggttcttgcttcttaattcctcggcaactactaaatcgtggtttttgattagtgcagttgagagtacttgcaagaagtcatttcgctgtctgcgaatcttatcgtgcagtttagcgactgctagacgctgtttttgataattcttggctaagcgcaaattgcgtccctctttcttagctctgcgctgcctgcgagacaagacacgttgggcatgggcaagcttctttttggttttgcgataaaatcgtggattagccaccattgctccgttagatgctgttaagaaattatcaagattgaggtcgatgccaatttgactctgcgtcttaggcaattccttaacaaaggcaatatcgctgcctagttgcattgataagtaaaactggtcgtcagcggtctttttaatcgtgactgtgccaattctagttgggatatgattaagcaaacgctctttaatcaattttctaaagctggcaatgcggacaacgcctagcttaggcaatttaacgtgcttagcatcaataaatctagctgtcccgttatcaagaaaggcttctgtctgtttaggatactgacagttggtctgatatgaccaatcactacgttttttgtgaaaagtcggaattccatgaccaagcttgcgatagttgttccaagctttctgatagttttgaatcgcattggcaatagcgagactgtcaatttctttaacgcgtaaaaagctataggcatcgcgaatgttctttggcttagccaataactcattattggcgactacttcttctgctagcttagtctcataattattaagaacagaaaaggcaaaaggcattacttgatattgtctaacagctaagtagcccttagcccgataattgttccgattacgtcctacataagagttgtagacaaaacgctgagcatcataatttagcttgatgattttcttttgtttagaactaggataaaagcgtactttcaagccaaaatggtaggctaaactgctcattctcttcatgtgtttcacctccttctgtagattagatatttatattttacaggaaagtcgaacatatgtcttcattttttaataaaaaaagctgaccattaggtcagcttggccctatccatccccgcattaaaatacggggaatttccgggcgtttttcattaaaaatagcgaaataatgaagatccagcgccaattaagtgcatcggtaatcattccgccaaaaactggccctaaggcaacgacacaggcagtaatcatagtgccgattcccatcataaagcctagtttttctttaggtacttcagccaagataatattgtacattaacggtaagccaatccccgtgccgactccttgcattgcccgtcctaataacaataaatcaaagcgcggtgataaaatatcgatgattagccccaaagtaaacaaaagaactcctagaataaaaattttcttagtcgaaattcttaatctaatctgtgagctaattggcacaatggtcgcaattaccaataagactagtgtgtttacccattgaacttgatcagtagtaatcgaaaattctttaattaacgttggaaaagtaactgtcgtggccgtttcatccaatattcctaaaaatgagagcatccctgccgacaaaatcgctaataccaagcgtggcgtaacttttttagccattttccatcttcttttctaaataacttcagtgcttttgatataagttcattatactgtttgtcgactgccgttcacaaaaaaataaagctcaagcaattctgctgagctttactacttaatatcttaattttataagccaaacaataacaagttctttccttctacattcatggagccatccttcttaagttgattcaatgaacgtaaaacaaaatctctttgactgccacgtaacttcttagcagctttcattgcagcgttaaagtcacgtttgttgtttgccttcttcagactggtatttaatctattagcaattcgcttgagtggcttaatcacaccttgcatagacttgctgtttaggtagtagtattgcaagaaagcttgagtaatccaagttgaatactttttatcctttgaagcgactacaactaaatattaccaatttgccgattatcttactgaattataaaaactaataagactatttaagctaagcgtgttatattgatattcacgttaacgttcaattttctaaaattttcaggttacttactatttattaatctatagagttccaaaatacctaaaactagactaaatcctcccaaaataaggtagtcatatatcgattcagaacgttctatctgtactattaatcttgcagcagaccaacccgtaaaaaatataaatataaacgctaatatgcctctagcaactctactagttaaaattcctctcataatacttttttatactcccatttaacagattgtagatgttttctatgagagtcagtataagtataggtcttccaagcataatattcataccctctagtgcaatattcttttatcgtataccatttatttttaggattctttccaaaaatatcattataaacagtataggcaaaaccgccggcagaaacataggggccaactacaggaacaaatccaagcaaaccaataataatatccttagtagttcctttcagtcttcttaccgtatctgcactatatttctctgtcgtcaaataataatactttctacctgcatgtttaaatgctaccttaccatttgcgtacgtaaaattaataaatggatcaaaaccacctacacttgtcgtaggtaactggctattatttatatcaactgaatatacttcctcattattcaaataaatagtatatacaccattatttgaaacaatgcgatatgaatatatttgaccgttatatttaatctttccagctaattttgaagaattatctggaagaatttgcatttcagttccatctgttagcttaacactctgccaagtgtatctactactttcttgactattctggctacttttagccgaatctagcatagaagcattaacagtattaggaactatcccttcccctgctgctaataacattgtagctgctatcaaagatacaatgcctttagatatacttctcacaatttcttccccctcaacattaaataaattcttctaacttcagttttatattaattttaaatctgtgctagaaatatcactaaaagctgaacaacaaaatattatcttcagccttatcaatattgccaacttttttcacttgattcaaagattctaagacaacttttctttgattagcaggtaatcttttagcagctaatacagcttgattaaaatcttgcttattccgaatcttctttaggcttgaagagtttctagttgtcaatttagacaatggcttaattacttgttgcatctttttagtattccaaaaatagtatttaatagaataacgcgttgtccagcaactatattttttatctttagagacaagcagatactgtggtgctccaccaaattttataacctttgtcgcataagcaactttttcaattctaaatctaacgtttttaattttcttccaactaactgattttgcgttagatattggcttagtagtagttaattgtttcttgtaattcttttgccctacataaatcttccctgatggggcttgaatagttaacacataaccttgttttgttaggttaggcttattaacaatatttgcgacgggttttccactctcagtagtattggtatcagctacagcttgaacccgtttaggtgcagtcattaatacaccagtggtactagctactaataatacactagttactaatttttgaaatttcaatttttccactttccttttatttattaataccagttgtgagcctgccaaaatcttttagccgccgaccatgaaccataacgtcccttaacatatcgtaaggctgttttttcttgatttgctttgctataatttccgtttaaataagtatttgttaattgaaaacgcccaatatagataccatttcttgcattgtaatttccaccagattcacgtgcaataatccacatcttagcagctctctcttttgctgaaagactatcataatattttctctttaatgagcttggaactgaagtatctgatctaagatatataccaaatagtcctgacaaatcttcattttgtggaagatataatggcgtgccattagcaatggttttatctggatcaatattatcattcaacttttccaatacacttaatgaagtgttgtttgcttctgcaacttgacgaagagtttgattatcacggctagctactggcgtaatcaaattcttatctggaactgcagtatttgcatttacctttaaagtatttgtagttgcttgttgtgaactatcggttgtatcagcttgaacagccttagtaccaactgtgaatagcatccctgcaacaactgcagatgacaataataagtttttcttgttgaaaattttcattttcgttctcctcattaaatcaatgaatatcttgaaattcataagttacttactacctattcataatttacataaactatagtaatgcaatcctggagactgtcaagaagtttgtgtaaataatctctctcgttgattgacttttttatttatcttttaatcaaaataggattctagggtgtctcgaacttgcccaaatcctttatgaatcctgttaaagtaacggtcattgtaatccattgcctgaactccaataaaggtgtcaagcgactgctcagttggaaattctgttttaggcttggttttccgcttaagcctgttgttaaaggattcaatcatgttagttgagtaaattgaagctctaatagctggcggatagttgtaaaaggttaacagatcaggctcaacctgtctaagatctctaactacgtttttgtaggctttttcccagttttgatagaattcatgcagcacctgtacagccatttctttgtttgactgagtatgaatctgcttgaattcatccagtgcttttttcgatcgtcaacccgcattttggcactgatattacgcatgacgtgtaccaagcagcgttgaaaatgcgctttaggataggactggcagatagcctctttcatgccaactactccgtcagacaagaagagctctacctgttcaaggccgcgactcttgaagcctttgagcatttcgctccaaatctcaatattttcagtaggcgcaatacagtagtcaatcacttctttatgaccattaggtttgataccgatggcgatataaactgcttcgcgctcataagtgacccgcttaagaggaatataggtggcatcgagataaacgcagaagaacttatctgacagatgtcgctgatgatatgcctcaactttgggaatcatttctttagaaatattggaaaccatagctggagaataatagccgccatacattttctcaatcaaatcagcgatttctcgggttgtgacgcccttggaatagagcttgataacagtttgctctaaaacatcagtatgccttttataatctggcatagtgtgttgatgaaactcaccgtttctgtctctaggaactttgatttctatttgtccgaattgcgtatcaaccttgcggtaataagcaccatttctagaatttccggtattccagccatcgcgctcataaggattgtagcctaaaaaggcagtcaattcggattcaagcaggtcattgacagcctgttggagcttttgtctaaataaatcattaattttatcctgattgaatagagcattagccatatctttggtaaaatcattcatgaaggaatctcttttctagtatgtttttcgttcaaatcaatcatacgggaaaaggattcctttttctaatattcaggaaaataaaattaaggaaatattcatccttacacaaactattttacagtttcgcatttgacatcatatttgcaataaaaagacagagtagtattacctgctactctgtttaattaatcaattatttttcagtatttgtcaattttatgcacataaaaaattcctaatgtactgtattccaagaaactggaactgaagtcaatcccgtggctacgcttccagtacttccatgtaagaattcagttactggcttgggtgccttgaaatgatgtgtttgaatatattgcgtaatttgataactgagtcgaccataaattgtttgaacagattcacccttctcggctttatcaattgcttcgtcaaacatgttaattaattctgcgtcatgctcaacttcgggcgtaaaacgtacttcctcaagtgcattttttaaagtcataatatctggtgaaaattctgaattcttatccttctttttgccaaacataattattttcccccctcattatcaatgagtgtaatcctctatctatgatattcaaagccataattttcctctaaactaaaaccaaaactgtataaatagctatatatgtaatgaaaaatattgataaatacgcgtggtgctagttaaatcgttttagttaataaaaaagtccaatcttgttagactcaacttgtataataatagaaaagagcctgatctgattgaactgccttaagcttaagcgttttagccaccatttacaagttagttttaaagatttagtgataatttgtcggcactggtatcgtttgtatgcaccggctgagtttactcatcggcgaaatattgatcaaattaaaactacggacagtctgattttggctttacttatctggcaagctaagacaggaattgaatcacaaagaagattctgtgaatgtttcaattgtttatcacactcacgttttaatcgacgttcacgtcagctattgcaattgatttatcagatacggcaagaaatgaataaaaaggttgacctgaatggacatttcttgatcattgacagctttccggtacctgtttgccaaccaattcgcaactatcgtgctaaaatttttcgcggttatgccaacattggttataaggccaccaagaaaatttacttctatggtttcaaagttcatgtcattgttagcgatgacggttacattcttgattatgtcgtaacaaaagcatcagttcatgatgccagggagacagttgaactgctggaaaatacccatccatctaattactatcttcttggcgacgaaggctatttaggcaaagaactgcatcaacagctaaaacaaatgggttatgaactttggacaccatatcgtaaaaatatgacaggagctaaaaagcacaatgatcatcaattgatggctattcgcagaacaattgaaagcgacttttcgcttctgacctattacaatgccgagaacaatcgagcacgtagtctgataggctttcaaagccggttggaaattgcaattttagcttataatttggcttattgtctagaacgatttaactagcaccacgcgttgataaatacttaatcatttgtaaataggtagtttgtttatccggatgctcaaaaaattgttttaattttggccataatattggcaacaaaaaacaactaaagatcaatggccattttgctaaaccaaaaagaacaacgataattggaaataataatcccgcaataatcaacgtcttaattattttaagagcatattttttaccagtataactggctaaagtatggcgcccattgtttaaatcttcatgcaaatcacaagtattattagctaactgcaaagcatagaaaatgagtgttaaaggcaaacatcttatcagagtagttaatgctaagttccaggtcaaaggataagtgccgtaaattgtgacatagatgcttactagcataatgaaatacgaaataaaaaaagataccactaattcacagatcggtgttgcattcagtggcttaggacccgcagtgtaaaatattccaatgaaatatcctacaactcccattattagtactggccagccggtgcgataaaccaaaataatacccggaatcgccgaaataaagtaactaatccacactaagtttctaacatcagttaaaggtaacttcagacgaccaattggatttatatcagtcaaaaaatgtcgatctttgctatgaagataatcatagtaattatcagcaatattaactgctaaatcaaacagaaaaacatctactaagcacagtaaaatgttaatcaaattaaacatgtgatattgttgaaacgacattgccgcgccaaagacaaaccaaattacatttaatggcgccgtataaatctctgatagttgataatatactggccaagataaaaccttcttcatagtaacttattaatcctcccattttttacttacatcttagtctttttctaaaacaaaacatagttactaattttgaagatattatcgcaaactactactttagttattaatagctttcattacaactgatgaaacttcaccactttattcttcaatgaaattttttgcacctcaaagccataagctggtaattcttttttataacgcaaaaaggaatgatctaaggcaaccccagcctgctggccaagctcatcaaaagaaagctcaaagtccccagccttattatctttgatatattgccataatttattatatttgctcattttctaagataaatgttctaaattagatttttcaacaaactctgcaaaaaatggcaacgccaattgtactactcctctttgaggggatgtaatcaattgatcatctaacagccttgcacgatagaccgaaatgtaattaataggcttgtttaagatatcttgcaattgttttgtcgtgacacgatcggttccagctttgattattgcttcgataaaatcgcgatcagttttggaaagatccatatacattctttcataggcattcctaaaaaggtccttttttgcagctcgaattgtttgtttcaaaacttcttcgtttaactgcaataattcccgactaaatcgccaagcataataaccaatcgtttgaaaggcataagcatagcctttaactgcacggctcatttcatccaataccatgaaatcaatttcacgttttcctttagtaaatgctttctcatagctattagctattgttttttcatccaacggtgataaataaacacgattactacatagtaaaaacgtgagggtattattcattctgtacttcggatattctgcttggcaatcctgtcatcaataatgaaatatcttattcatcaccaatcaatgtttgatattctgagccaaaagcccgaacatcgtcactaatttcaatttcatctattccgattagaattgacttaccctgcttttttaaacgacttagcaaaattgaaatatactcatcataatcaatttgctgtgattcttgtagtgcttgcccagtaattccctttcccataatattcaaacttttaacactttttaacaagtcaactaacgaaatacctgcaactcgttgcaaaccatgcattaattgaaaaagcaaatctccttgaccattatttaaacgaataaatatccaattatctaactcttctaaagatctttgaacatttaaaaggaaaactgtttttcttgatcctcttgtgacataaactaaagaagtttgatacttagcatcatgtgtttgcaacccagttaaataatcagttaaagcttcttgctgatcgataataattttaggaaaacgaccaaagttaggcataaatggatttaacatttttgcttccataaaagtctctttttatactttctttataattcaattttttattttatatttctttcccggatttaaaattgaagtgcaacactaagtgttaaacaaaaaggccatgaagacctaaacttgaagtgacgaaaaatcaagaaaggaagatctttatgaccaattcaaattctagcatttctaagcactatcatcaattaaccagcgtacaacgtggacaaattcaagcaatgctggattccggcataacttcccgtactgttatcgctcaagaagtcggctgccataagtcgacaatcagtcgcgaaatcaaacgcggaagtgtcctgcaaagagacagcagctatttattgtatgagcactattacgctgatactgcacagatttattatgagaagcgtcgcaaaaactgctatcagcgcaatccattgaagcattatgctgtctttttgagaatgctctccagacgctttaaagctaaatttgatgccaccagcatcgatgaattcgttggtgaattcaaaaggactatgccaggctacccttgtcccagcacaccaactgtctatcgctatattgatcagggcttgctggacataagcaatattgatctgcctatgaagctcaaaagacgcaggaacaagcgtcatcacggccatagcggtcatgctttgcacaagaagcatcttggcaattccattgaacagcgtcctaaagagattgaagacagaaaaacgccgctgcactgggaaggagatctggttaaaggcgtcagacgcaagaatcagcctgctttaatgactttgaccgaaagaaccacacgctttgaagtagttatcaagattcctgactatcgggcaagcacatgccaaaggctgcttcaaaatgagattgacagacatcctgcctggtttaaatcgatcacgtttgacaatggctctgagtttgcggatatgaccaagatcaaaggctgccagatctacttcgcccacccatattctccatgggaaagaggcaccaatgagaactgcaatggacttctgcgtcaattcttccctaaaggcaaaagcatgaaagataagtcagctgcttatgttcaacaggcaactgatgccattaaccgcaaacatcgtcgaatccttcaatatcacacagcagaagaactcttcaagcaatatatttcctcatagcctaactgttgcacttaatttgacaattcaggttttatatttcttttataataagttcaattaagttatcaccaaatttgcctaaaaaaataaagcctagcaaacgctagactttatttaaataattatcaaatgattattcttcgtttaatgatgaacggtcgaatgaagcatccttaagttcgtcatcgatagtcttagtacctaaccaaccgatcatttccttcatagcatcggtaatagcttcagtacctggaagcaataacttacgtgggtcgtaacccttgttacccttgtctaagtccttgccagcttcgatgtattcacgagtagccttttggaatgccaattggaattcagtgttaatgttaaccttagcaataccaagttggatagccttcttaacttggtcttcaggaatacctgaaccaccgtgaagtacaagtggttcatttggaactgcttcagcaatttccttaagacggtcaaagttcaagcccttccagccttctgggtaaacaccgtggatgttaccaataccacaagcaagcttgtcaacaccagcagcaacgaatctcttagcgtcttcaactgatgctaattcaccaccatcagcaccttggttttcaccgatcttaccaatttcagcttcaactgaaataccacgttcgtgagccaacttgatgatttccttagtcttagctaagttttcttcagtatcaagcttgtgaccatcaaacataactgatgagtaaccaagagcgatacattccttagctgattcaaagtcaccgtggtccaagtttaagataactggaactgagatgttcattgaatccatttggtcagctaccatgtccttaacgaacttgtaaccacccatgtacttagcagcaccagttgatacttggatcaacaatggagttctagtttcttcagcagcacgtaattctgcacgagtccattccaagttgttagtgttgtaagcacctacagcgtaatggttcttacgagcatctttaaagatttgattaccgttgtcaaaataagccattaaaaaatacctcctaaatatcttacatgcctattgtaccctaataattgaaatatgaacaatttttcacagaatgtaagcgttattttcttattttcattgtttttctcttacatttctttaggagcattgacacctaacaatctaagtgattccgttaaaacgattgatgttgcttgaactaaggcgagacgagcaccaattttatcgtccttggttaaaatcttcacattagcatagtacttattgaattttttagctaaatctaaggcaaacttagctattactgaaggttcaaacttttcggcacttctagctacaattcttgggaaatctgctaaatctttggctacggcaaaagcccagtcatcatcaagagctagatcagtttcgctaggattttcacccatcgcagcagccttacgtaagacgctttgtgcccgagcattagtgtattgaacataaggaccagtatcgccttcaaaacgcacaacttcttctaggtcaaagtcaaaattgtctaaacgatcattcttcaaatcgtggaagacaacggcaccaacaccaacatcatgagcaacttgatcttgatctgctaaatctggattcttttcttgaatttgttttttagcaagtgaaacagcatcctttaatacttgatcgaggaagacaacgttaccttttctagtagataactttttaccaccttgggtgattaaaccaaatggtacgtggtgaatttcatcagcccagtcataacccatctttttcaaaacagtcttcaattcaacaaagtgttgggcttgctcgttacctacaacataaagcatcttaacgaagttatattctttcattctccattcagcagcggcgaggtcacgagttaagtaaattgaagtaccatcagatttaacgataatagcaggattttcaccttcacccatgtcaacaacttgcgcaccacgtgattcatgaagaagacctttttcttttaattcatcaattactggttgcatcttatcgttaaagaaagcttcaccattgtatgaatcaaaagttacgcctagttctttataaattcgcttgaagtcttttaatgaaacctcacggaaccatttccatagtttaactgcttctggatccccgtcttcaagtttcttgaaccattcacgaccttcattatcaagttcgggatttttctcagcttcttggtggaactttacatagtagtggaaaagattcataatcggatcttttttaacgtcttcttcattaccccagtgcttgtaggcagcaatcaacttaccaaattgagtaccatagtcacctaagtaattgattttaacaggagtatagccaaccttctccattgtcttagcaattgaattaccaattacagttgaacgaaggtggcccattgacattggcttagcaatgttaggactagacatatcaattggcacatttccttcaccaatcttttgatcaccgtaatgttctttttcagtcaaaacatccttcaaagtcgatgaaactaatttttcatggtcaatcgcaaagttaacgtaaggaccgactgcttggatattagcgaaattatcacttgataagttatccgcaatatttttagcaatttctgcaggatttttgtgcaaagtcttagccaaaataaatgctgggaaagcatagtctcccatcttagcatttttagggcgttcaattaatgcagcaattttttctttaggtaaatcaacttgactagcaaccaagtcaactacttcattcttaaagtccatcttattcctctcttctaaataaaaaagtctccttctacaaatgtagaaagagacgagttaaaaacccgcggtaccactcagattgatacaaagtatccgcttatttaaattcttgattttatcagtcaaacacgccttcattatcttctagtatctatcttgcaccaacatagactcgcttaaaaagaaaataactactacttttgacttcttggcaaacatgattatagcaggaaaaaacggcttctgccactaatttggttaaaaaaaccattcttgagttggattaaaatcttgaacgctttgaacaaagttttttactgcaattttttaaaaaacgttgcttaaaaagcaacgttcttgttaattatttttaatgattaccttcgtaccatctgggatgtgatccataatccacttagaatcaggtacactcaaacggatacaaccatgtgaaccttgagttcttcccaatttgactgcttcttttaagttatagctataatcagctttagttggcacagagtggaacaagtacacgttatcaggactccaactagtccaattattagctccttcacctaagttataattgaaaaagctgtctccacgaccattttggatcctaaaagttccagttggggtcaatgacttgcccttcttgtagattccaccagttgataacatggtatacaaaaccttgccttttcttaacaaataggtccggtttccttttaatgatacccgcaaagtcaaatccttttcatatggcttaatcttaggatattttttaggctcactctttttcttccaagtgcctgccttgcgcaagtccttaggatcgctatatggtcgatataaagcaccattatctacttttttagtttgttttttcttagttttatttattttcttagttttggccttagtctgcgttgtagcagcttcttgtgagacatcagacttaggtgcgcataccttagctaagccgataattgcaccaaaagctagaacgatactagttacgccgataataatgttttttttcataaatatgttaatcttcttttttattaatatttaactcaattatattatgctttttcgtctttgaagcgttaaaaaacatccctcaactagggatgcatttatttactattagaattttaacatgtttatgccaattctgaatactttttcatcaatttaggcaatactttagaaagttccgttggtcgtaccacataattatctttggcaagcaagtcacctgctaaagaatgaagatagacagcagcttgaacggtttcaacgcctgggccaaattgagcaaccatcccaccgatgattcctgctaaagtatcacccattccaccagtggccatgcctggattgccaattggattaacaaaaatttgaccagtcccattataaacatgagtatgattcgatttgagtactaaaagcgcattagtatctggaatcaattggtttaaagcatcaatactggcactatctgtttgaaacggaatacgaatttgactcaatcgttgccattccatttgatgcggcgtcaagattaagtggccagcattagttggcaataagttcttatcctgactaattaaatcaagagcactggcatctaagacaacggtttgtttttctgaagtacatcttcgcaagataactaaaatttgcttagcgagatcactcatgcctaatcctggcccgcaaactacaacatccatatttttgattaaatctgctaacttagcatcgcgccagttgataaacattgcttcaggcactcgtgcatgtaacggtgctaaattcaaagggtgtgttgcaacagcagtcaaacctgtgccagcattaatagcgccttcggtagacataataatagcgccaccatagttctcactaccaccgatcaagagtacacgaccgtaatcgcctttatgtgtatcgctttctctttctttaattacctttttcaagatatcttcagaaatttcagtcatatttatcttcctccgaaaatccagcgccaaattctgacaaaaaagttcaccttgttattagctgacaatgccttagccttgacgttcatcccattaggattagacaatgaaacaatcttttcattaccagatttaaattgataatcaccaactgtttgatctttcttaattggtgcttctacagattttttattcaatgatgccactaaagttttgccatcagctggatcccagatagtagtcttttgcttaagtcctaaattagtagttgcattatcaccatcaacaactttaattgtcttagcgccattcatttggctaccagcagtcattgttacaggacgatacttggtaaaaacataattcattaactttttagtttgttcaaatctagctggatccgttccgtcacggtgacgtgcgcccattactacagtcagtaaacgagcaccattgtgttgtacagttccgataaaacaagcccctgcagcatcagtagtccccgtctttaagccatcaactggataagcttgatcatattgagaaagcccctttaacatccagttaaagttagccatcttagttacgtgaccagcatctttaaagtttaagtgagctaagcgtgtagtttctaatacttctgggaatgccgagattaatttttgaccgacaatagccatatccttagctgacatcgtattttcagcatttttatttacaccaggatatgcatctttacctaaattgccattaggtaaaccacaagcagtataaatcttggcatcttcaatcccccacttttttacttgagctcgcatttgatcgataaatgccttttgtgagccagcaattgtttgaccaagcagcatagcagcaccattagctgattcaattaaggttgcttgataaagttgtcttatcgtatacgaatgtcctagttttaatggtacattcgaatattctgcattattagctacctttactatcggagccgttggctttactttctgatcccatgaaagcttatgattttttattgcttgcagagttaaataaactgttactaatttagtcatcgaagcaattggcaaagttttagtcgcatttttggcatacaaaatttgacctgaatcactatcaattgcaattgctgactttacatttagtttaacttgatcagcttgatagctactagttgtatctgcgctaactggtatagttgcaaataccgcaccacaagaaaaaattgatactgcagcaatcgtggtaattgctgcacgttttatttttttgctaaaaaacatgaatttccatccttttttataattaaagtattttatgcttacattttaccaaatatttggtatgattattcatgtaccaaagaaaattgcccgcttggcggaattggcagacgcgcagcgttcaggtcgctgttcaggtgactgagtgaaagttcgaatcttttagcgggcatcataattatgtgtaagtgttgagcaatcaacacttttttcatgcctttgctgtataatatatgtaaaagagatagaacagttagaaacgagttgattatcatgcaaaaaagacttacaaaatcacaaaataaaattttagctggcgttttgggcggtattgctaactactttgatctagatcctgcttgggttagaatcatcggtgctgcattgatattattcacaggtgtatttcctggcgttgccttatatattattgctgctatggttatgcctgaacctggtcaaagcgcacctaaggctgaaaagcacacagttgattatcaaactggtcgtcctaataccatgaatggtgacttcaccaagtctgacgatcaaaatcctgactcaactgagaaaaaggatgatcatgcagaataaatgaatgctataatataggtccttggcaggggcacaagttgatttcttcggaggtcaacttttttctcccaatttaatgtaatcgctttcataatacgcaattatgtggtacagtaacagtgtaagcaatgattgaattaaaagataaatattctaattatttatctcctagataaggagatgggcactatgattactatccttggaattacatttttggcacttgaattaattggagtcattacgttaacagcagttgaacataattaattctaaaatcttattacactcctaaaatttattgatatttataaaaaaggcactacagaaacaaatgatatgaaccccgaaattcggacaagaatttcgaggtttttattatgactaaattatccaaacaagacaaaattgatatttacaataattggaaaaattataatatatcagctaacctagctgctaaggaatatggggtaaatcgtacaaatttgttttatctgattgccttaatagaacgtcatgggatagaaattcttgataatagctataaagattactcagttgaatttaaagagaaagccatcaaaagagttatttatgatcatgaaacggctcgtcaggtatcattggatttaggactgcccagccaaggtatgcttcacaattggattcgcaaatataaagaagacgggtataatgtcattaatcacaagaaaggcagacctacccatgaaggacaaagacaaacagattcaagagcttcagaagcaaataaaagacctcaaacagaagaacttaagacttactgtcgagaacgaatttgtaaaaaaattgagcgccttagtctccccaagaaccgaaaaccaacagcacaagagatagtttctgcggttacgcaactaaggcaagaactccacgtaaccgttaagtttgtgcttgatacgattaactccaatcctgatcttccgcatttatcacgcagtaattattactacactttaactaaagatgataaagatttaaaaaacgaaaagattatggaacggatcaaagaaatatttgaggagcacaagcatagatatggctatcgtagaattactgcccaattgcgacgtgaaggcattatagttaatcataaacgtgttaaacgattaatgaccaagatgcatctatatgccattgcaattagacgcagatttaaatattcaagctacaaagggactgttggaaaaatcaagcccaatttaattaaacgaaattttaaagcaattattcctgatagacattggtactcagatattactgaatttcaccttaatggagagaagctttatctgtcgcctattatggatggatgtacgcaagagattgttgcttatacattaaatcgtcatccggtactaaaacaagtaatggacatgctggatcaagcttatcaaaagcatcctgcactcaatgggttaatttttcatactgatcagggctggcaatatcagcacgctgttttccaagcttggcttaaaaatcatggtgtttcccagtctatgtcacgtaaaggaaattcattagatgatggcttaatggagggcttctttggcattcttaaacgaaaaatgttctatggctttgaaaagacattcaaaaccatgggtgaattagaacaagcaatcaaggaatacattcattactacaatcatgatagaattaaaacagtactaaaaaaccggctctataatttttgtactgagacgtaaaaagtagacaattaaaatattggattaatagaggcttgacttcgatactctttcggggttaagccttttaatctgctctttatcctttcgttgttatagtattcgatatattcctcgattgcttgagttaattcttgaagattatgatacttgtattcttgatcatagaacatttcagttttgagcaggccaaagaagttctccattagcccatcatccatggagttgccctttctggacatgctttgagtaataccatggagttttaaagctcgctgataacgagggctttgatactgacagccctgatcagtatgaaaaatgcagttattaagagctgtttctttggcaaaagccttgtcaagcattgtcattactaaatccatatctggatgtttggagatagtataagaaactatatcgccaccgcagccgtctagaataggcgataagtaaagcttttcattattaagatgaaattcagtgatatcagtataccattttgtgttaggcagggctgcgaagaaatcacgatgaattaaatttggagctattttgccaatagtacctttatagcttgaatatttgcgcttattgcgcctgatgcctttaagacctaatttatgcatccaatagcgaacggttttctccgtaactttccagccctctctgattaactgcaaagctactctgcgatatccatagcggccttgatgatgattaaaaatctcatggattctagcaataagctttgaccgtttaggcttgacgggctgtcgtttgataatcttgtagtatgagcttctggcaattataggtagctcagggtgctctgcaatcgcagctaatacataatttaaactaactttgaattcttgccttagatccgtaatcaccctagctatttcttctgatcttcttggtccaaggcacttagtttttttacgtattcgttcacaatacgcaatcgcaagttttcttctttcagctgctggatctctttctccagtttcttgcgagatttctgcttttctttggtcacgggcagggcgtcctttctgtttgataatgacattatacccgtttttcttatattctctaatccaattgttaagcatgccaatacttttaaaccccagttccaaagacagctgtaagtatggtttattgccaaagattgcttgttcaatagttcgctgcttaaactctttggaatagctttggtttttagtagttaaaatttctattccatgcatatcaattaatctaagcatatagtctaaattagctagattcattctgtacgctttagccaattgactgattgagatattttcatctttccatttatgataaatttctattttttgttctttattaaatttagacatagtaaacattctaagctaaatagtgaattagttatccgacgggataattgattcactatttttattcttttgtagaattaaagtagtggtaaaacgatatgccctgaggtctttagacacttgatgtcgcataataaactggcagttttacttaagttttcaatagtctcttcgaagaatgtggacactagatgtcgagtttagaaaattagatctgatttcttaagtaaatacgttttactactaagttttggaggtttttattatgcaagttacttttggaattgatgtaagcaagtctacttctactgtttgtgaactaattggtgaaagcaaaaatgaactaaccattactaataatcgtcctggttttattcaattgcttcatgaattaaccgctttttctaaacatccgcaaattatttttgaagctaccggtgtttattcacgcagactgcaggcttttcttgaagactacggctatgaatatgttgttattaatccgcttaaagccaaaaaagagatgaatatggggctacgctacaacaagaccgataaaactgatgcttatcatttagctttaattcaaagactttatcgccatccggttaatcaaagcgaatcccaaacttataagcagcttaatgctttgagccgcttctatgaccagctgacaagtgacttggtaatagctaaaaatcgacttcaccaagctctacaatcgacttttcctgaaattgaaaatttattttcttctgctaaaggtaaaaattactggcaaatagttgtgcgatatcctcattgtgacttagtaagaagagaagataaaaaacagcttattaactggttaatgagcttaaaggggattgcttttaaacacgctctaaggactgcagataaattaattgaattagcttatcaagcttatccagttgtatcttgctctagcatagaagtcgagcaagtgcagtattatgcacacagattgcttaatttaagtgatcaaagagaaaatttaatcgcaagaatggttaagttagcgaagtctttgcctaatcatgatttagaaaacctagaaagcattccaggctttgcacagaccactgctgtcagagttttagcagagttaggagatttacgcagatttagtaatcctaataaaatcaatgcttttatcggaattgatccaggcagatatcagtcaggagaaatggactctaatttaagtattactaaacatggcaatgcagtcgcacgtaagttgctttatcgagctattggacaaattgataatgcagctaagacaaatccgtgtcatatagcagattattatgaaagcaaaaagctatcctctcaaaccaaagggttcaaaaagatagctattgcttcaattcataaactaatcagaaccatttatgccctgattatcaatgatcaaccatatgattacaacgtagccacacataatcaaaaagactttagtcgtaattaattgatcaagtacattataacgctaagcccaaaaatcagatatggatctgggcttatttgtcgtgtctaactaaaaaaataaatcgacactaaaagatgtttaagttgaaatttaaacaaaaaatgaagccaaacttcttattatgcttgactttacgtagaaaaagacctaaaagtgtctaacttttagaaactgtcaaatcttttgtgtaaatagttctttctcgtaaattgattttttaattatttatttaatcaaagtaggattctaaggtgtcctgaacctgaccaaagcctttatgaattcgattgaaataacggtcattgtagctcattgcctgaataccaataaaagcatcaagcgactgttcagttggaaactctgccttaggcttagctttgcgcttgatcacattgttaaatgattcaatcatgttagtcgaataaattgaagctctgatctgcttgggatagttataaaagaccagcagatctggttctatgtctttcaagcttctgataacatggctgtaaaccttgccccatttggtatagaagtcatgcaggacagctgtggcttcttctttgtttgtctgttgatgcacctgtttgaattcgttcatgatcttttcacgatcgtcgacgcgtactttagcgcagatattgcgcatgacatgaaccaaacagcgttgaaaatgagctttaggataagtcctggccaaggctgttttcatgccaacaacaccatcagaaagaaagagttcaacttgcttcaagcctctggacttcatgttttgaagcatctctgtccagacttcaatgttctcactaggagcaatgcagtagtcaatgacttccttatgtccattaggtttaatgccaatggcaatatagactgcttcacgctcaaacgtttctcggcgcaaaggaaggtatgtcgcatccaaatagacgcagaaaaacttgtcgcttagcttgcgtttgtggtaagcctcaacctttggaatcatctgcttggaaatatttgatacctgagctggactgtaatggctgccatacatcttttcaattagatcggctatttccctggtggtcacgcccttggagtaaagcttgataatcatgctttccaagatatccgagtgctgcttgtagtcaggcagcgtgtgctgatgaaattgaccgttgcgatcccgaggcacttgcacttcaattgggccaaattgcgtatcaactttgcggaaataagcaccatttctagagttgccagtattccagccatttctggcatagggatcatagcccagaaaggcagtcaattcagcttctagcaagttattaacagcctgttgtagttctttgcgcaataaatcatttattttgtctggattgaatagagcttgagcaaaatctttggtaaaatcattcatgaaggagttcttctttctgtatgtgttttttttgttcaaaccaatcatacgagaaaggaactcctttttctaatgtttaaagaaataaatttaaggaatcattcatccttacacaaactattttacagtctcaacttttaggtctcagtttattttagttatttaaatgactttttttgcttattatatggcgctttttattaattcattgtgtaatttttacattaatcgaatcctaaaaaaagtggctataatatctgttcacctttaatcataagattttacgtatatattgtatagttctaaattacactttatatacacttagcccatgattatgtctatgttatttaaatagagctcttattttctttcgacacctttatcatagatcaaataagcaattttggctgtataatttgtcttcatgctttaaagctgggaagaccacggtaaaggttgagcccttgcccagttcactttcaaggcggatcgtcccatggcactgctgtactgcgtgcttgacgatggacagaccaagtcccgtcccgccagtcttgcggttgtgggacttgtcgactcggtagaaccgttcaaagatgcggttttgcgcttcaagcggaatcccgatccccgtgtcagaaacccgcaaaatagcttgcccccgcacttccttgaccgcaatcttgacctggccgccaggattgttgtagcgaatggcgttgtcgatcaggttgtaggcaatttcataaaccaagcggaagttggccttgatttctgtatcggccaaagccgccttcagctcaatctcgtgcttgtcagctgacgcctgcaaggcttcgatcgcctcggtcaccggactcttcaggttcatccggacctcttcaaattccggattttcgtccaggtgagacagccggataatgtcatcgatcaaggtcaagagctgagctgaagattcatggatcttccggtaaaaggctggccgatcgtcttccttgaccaggttgttttccaaaagctccgctgaccccatgatggactgcagcggcgtcttcaattcatgggacacattggccgtgaattcgcgccggacctgctcttcatggtattcttctgtgacgtcaacgaccaagatcgaagtcccttttaagaccttccgtgaaaaaatcggactggcactaatttgaatgttgcgcccttctctttccacgatcccttcggtgtggacggtccgcttgtcttgatcgatgatctttttaacatcatctggcaaaacttcagaagactttgatcctaagagcgatactaccgccggattggacaagaggacctggtcgttcaggtctatcaagatcaggccttcttgcatggcatcggtgaccgtcttgaactccttctcccggtggtggagctgctccatttggtcagcaatctgcttgttttgactgtcaagccgggttaacagcggcttgatttcttcatagctcttgctttcaagcggctggtccaggtctaactggttcagcggcttgacgatggactgcgagatcatcttagctacgaaccaagaagcaatcacggcgatcagcaagatgatcagcatcagcgtcagcaattgcaagatggtcatccagatcgaattccgcgtaaccgccacccgaataacgccgccgtctttcagctttttggcatagtacatcgtaaccgtcgacagggtcgtgctgtagcgctcgctttgcccttcgccctttttcatggcttcagcaacttctttgcgcttagcgtggttgcccatcttggctgggttttcctcgttgtcgtagagtaccttgcctttagcattgatccaggtaatctggtaattttctccttttagctgggttaagtacttccttcccccattgttgaccccgctggctgccaaatcggcctgcgaagccaaggtgttgacctcattgtgatcatagtcgatgcctaaaaaaagcgcactcaaaaccaccgagcagaccagcatgactgccgttgataaaaagactgcccgaaatatttttttaaacattaattcccttcatggtagcgataaccgaccccgcgcaccgtttcgatatggctaccagcctcactcaatgtttgtctcaaggttcttacgtgaacgtccaccgtgcgcgtttcaccgtaaaagcccgtttcccaaatttgatccataatttcttctcgggaaaaaacggtccctggatgggtgatcaagagcttcaagaggccgtactctttcaaggtcagctcgatttcctgaccatcgacataaacctcatgccgcttgagcaggatcttgatcccgtctttctcgatcttgtcttctttcttgtggttggtccggcgcaggaccgccttgacccgggagaccatttccatcatgccaaaaggcttggtcaagtaatcgtcagccccagaatccaggttcttcaccttgtcatattcggctgtcttagcactagcgatgatcaccggcaattcttcagttgacgagttgccacggagctttttcaaaatatcgctcccatcttcatctggcagcatcaggtccaagatgaccagatctggatgcttttccgccagggccttgacaaaagtcgtcccgtcttcaaagccacgcaccttaaagttcatcgactccagcgtatacatttcgattttgcgaatgctttcgtcgtcttccacacaccatatttcagtcataaaaaaattctccctaatctatctgcaaatagctactctaattatagcttagaaacatttgctatgcagatagatcaggaagaatattaatttagcaaactttccaagacttatcttccggccttgccagttgccacaaacttggtccacttagcaacgttgaccgcgtggtcaccgatcttttccaagtacttggcaaccatcatcaggttgatcaggtattctggattgccatccttgctgaagttgttgatcaggatttctcgggcatggtcaaagtcatcgtcaacaatgtcgtcgcggtcgataaccgcttgcgccagttccagattcttggtggacaaggcggttacggcatcatcaaccatgctggttgaggtttgcaccatggacttaaggttcagctggtcattggcgatggacaggtgttcatttaacacgagttctgcaatatcagcagagatttccccaattctttccaggtcgtaaacggccttcaaagaagaactgatcacccgcaagtcagtcgcaactggctgctgctccatcaacaggcgcaagcagctgtcttcaattttccgttcgctcttgtggatgcggcggtgcaagttgactgagtcttcagcttcatggtagtcgcccgtaaacaaggtgttggttgcttccaaaatggcttcctggcacagcttgccgatgtcttccatggacttttgcaagttgtccaattcttcatcaaatcttgatctagtcattgtttctgcctttcttactctatctaattattactggtctttaaccgaaacgaccagtaatgtatctttcagttctttcatccttaggcatggagaagagttggtcagtttcaccgaattctaccaggtcacccagcaagaagaagccagtcttgtcagaaattctcacggcttgttgcatgttgtgggtaacgataacgatggtgtagtccttcttcagttgcagagccaattcttcaatctttgaagttgaaattgggtcaagggcactggttggttcgtccatcagcaagacttctggcttaacagccaaggcacgagcgatgcaaagacgttgttgctgaccaccagacagacccaaagcagacttgttcaaacggtccttcaagtcatcccagatagcagcttgctttaatgaggtttcaacgatttcgtcaagttcttgcttgtcggttacgccgtggatcttgggaccgtaagcaacgttgtcgtaaacgctcattgggaatggatttggtctttggaagaccatgccgactctctgtctcaaaacagtgacgtcaaggtcattgccataaatgtcggtaccatctaacttaactgaaccgtcaatccggcagccttcaaccaggtcgttcatccggttcaagcagcgaagcaaagtagacttaccacaaccagatggcccgatgaaagccgtgatttcattctttggaatgtgcatgttaaggtcatgcaaggcgtggaaatcactgtagtaaaggttcaagttttcgatagtaattttgtcttccattattaatttcctccgttattgcgcttacgcatcttgtctgaaatgcggcaggtaactaaagtaaagagcagtgcgagtactactaaaacagctgaagtaaagttggcaatttgggttgccttagggttcaaagccccttcagttctcatgacccagatgtgcagtgaaagagtttcaccacttctgaatggattcaaaggtgaagtaggtgaagtaatcttccagaagttgtgccagttgatgtaagtggattgaccagacgtgtacagcaaagcggcggcttcaccaaacccacgcccagcggccatgatgaccccagtcaagatttgcggcatagcagctggaatcaagacttttctaatggtttctgacttggttgcacctaaacctagagaaccttccttgtattcaattggcaaggcacgaattgcattgttggtttcagtagtgatcaaaggaattgacaaaattgagatcgtcaaggccccggccacgatgttccagctcattcccgtccacatgatgaaggccaggtagccgaacaaaccgattacgatggatggcagagaagaaagtgattcgatacttacttccagcatggtcaagagcttgccttccttggcgtattcagccaggtaaaccccagccccgatcccgattggcacggaaactaagagcgaaaggaaaactaagtaaagagtgttaaagaattggttgaagatcccgttgccggcagcccctaagaagtctgggctaaagcccttcaagccatcaaagataatggtaaatgtcaaatacagcaagaatgctagcatcagccagccgatggcgtaaaagacgccggtcataaaccgatcttttttcttagcacggttcattatttatccttctttccgttagccagtttgtgaatgagcacaatcaagacaattgagatgatgaacaagagcagcgccatggtccacagagccaggttgtattccccgccttgggcagtgttacccatgtcggctgcgatggcactcgtcaagttgctggttggtgacaaaaggtttgccgcaaatgagcgagtcttaccgataaccatggctacggctaaggcttcaccgatcgctctggccaagccaaggatcaccccggtcaagatgccgcctgaagctgctggcaaaacaactttgccgattacttgccagcgggttgcgcctaaaccgtaagcaccttcacggtagctcattggcactgacttaatggcgtcagcggaaaccgcggtgatggttgggaagatcatgatggccaaaacaatggatgcggccaaaactgagtacccacccatggctggatggaaaatatttttaatcaatggaaccagcttggtcatcccaaaccaaccataaacaacggatggaattgaaacgtagatttccgtagctggacggaagtacttttcaccgatctttggtgagatttccgtcatgtaaactgctgagccgatagcaaatggcaagcagataaccagggccagcaaacaggtttcaagagaacctacgatgtaaactgctgcaccgactttcccgccaaacaggccggtcttgtcaagcggtgcccagtcgctggtaaacaggaattcccagatgctgtggtgagccttgataaaggtttgactaccttggtagagcaggaatgcccccatcaagagcgtcaaagcaacaatcaagagcccgcaagcaatgtatactgcccgccagcgcttatcgctagcgatggctttttgaactaccttgtccatgaaaaatcactctccttttacttgtgttctttcttagccttgtctgaaagcttagaagcaacaccgtagcccatgccttcaacctttgattcgtattctttacttaacatcttctttaaaaaggccttaacagcagccttctttggttgacccttggtgtacatgtgctcgtagttccaaaccttgtatgagccgttgtaaacgttgtccagagttggcttaacgccgttgatggcaactgcagttacgtctgggttaccagtcaagtatgataaggcaacgtagccgacagccccttcaacgctttgaatcatttggatcaaagtaccggagtcgtcagtttccagtgattggtttgaacgactggcagtcttgtttaaagcatattgttcaaaagttgcccgggtacctgaagaagcaggacgtgagatcaaaacaatcttgcagtcattgccgccaacttggttccagttggtaaccttgccagtgtaaacatcgatcaattgctgggtggttaagctcttaaccccggcgtccttgttgacgattggggcaatcgcggtgatggccacttggtggtcaaccagcttggatgcggacttcttgtctaatttttcttctgcgaacaagtcagagtcaccgatgtcgatggttccatctgagacttgttgtaaaccttggcctgacccaccaccgttggtgttgatcacgctgtctggattttcatccatgaatgatttagctgcgctttggactagcggcaacagggctgaagaccccgcagcgttaacagtcccagagacacccttggtgtctgcctttgaactgccaacaacgcagccgacgactatagccagtagagcaagtgcgataaccactactctagttttcttgcctaacataattatcctccttgaattcttactaagtaaatagtaattaatggaggttaaatacattcagggggaaatgttaaatcaaagtaaaatacttaactttgtttaaattctggccggattttggaaaaatctttaccatttttcgaaaatcggttaatattctaacgttatttttcttagtttacattagcttaacaaagaaaaaaatgtaccgctttcacccttgctagttctatttaacatcggcttaacaatctttgaacctgatgcttttgttaattttttgtgagatatcacctgcgtgatgcattatgtaaccgattaaatctattcaaggctataaatagtgatatagttatgacatttgcttaagcagacaaaaagccagtggcatccactgacttttatctagctattcaattagttatttagttaaccgtggttgaccgcaaaggcgccgacccagaaggagacgacaaccaaaatcaagagcagccacaaaacaatctgccagatcaaggctagagtaatccaattcttcaaagggaccagattctcatccttgcgcttgataaagaggtagatggctggtgctaagccaaagattggccagacatatgcggcaaccagcagaaccaccatccaaatgttgtaaattggtgaatttgagtctttcattatctttcgctccttcactaattaagattttcccttatttctatcttaattatagcaatttacgctttattcttcactttctactacataatacctagcatgataatacattttttactggcttacttggcaatgtagacgtgttcgaagtagtaagagccgctgatcaaccagcaaggtgttttcagcctttgccagcagcttcatccacttgcctgagttgtagccattagtagaggtcatgcagtccaggaaggaaatttggtcggcaaagtccgcattccagccgctgatcgtggcttcaaagttaccagagtccatcttggcaaattgggacttggttggcaggctttgcaccttgacgtcgatttgcttgccaaaagttgattcaagagcactctggaagtattcgccgatggacttggacgtgtgccgtaatcaccgtaaaggacagcttctttaagccaagttccttcaacctttccttaaagtagctttgggccagctgcttgtggtggcccgttactagcaagctttccttggtttgagagaggtcggtaaaatccttgtcacccaccttggtcatgccagctgccgtaaagttcttagagcccgtgtagccgccgcccaaggtcttggctaagacgtttctgtctagggccatggagatggcttgacgcatcttggtgctctggaacttcttcattttcaggttaaattggaagtaagtcgtcccgttggtctttcttacaacatagtctggtgacttttgcaggttcttggaggcttgtgagctcaggcttgccgtgtccagcttgccatcttggtagaggtagtaggccgttgacggagatttttccacggcaaagtggatgctttgcagcttaacggctttggcgttccagtagttcttgttcttgaacatggtccaggacaagttggagcccgtccagcccttttgcaagaatggcccgttataaacggtcgtttttgatgacgtaccgtactttgagccatacttttcaactgcggtctggttttctgggaaaaagactgagaaggccatcaaaagcttgaagtatggaatcttatgttccagactaacctgcagcttgtatttgccagcggctttcacgcccagcgtatcggccttctttttaccagcaacgatctggtcggcatttttaatcccagagaaaatgtagctgtattggctagctgtcttggggttcaccgtccgcttccaggaatagacaaagtccttggcagttacggtttcgccattagaccatttagtccccttcttaaggtcaaaagtccaggtcagaccgtctttgctgacagtcgtcttcttgaccagtaccttaaccggcttgctgtctttgcccagctggtagagcccttcagtcgtattttcaatctgctggaaggacgtggtgtcggtggctttggatgggtccatggtgatgattttcgcactggtcatccagtttaaattctgcttgacagatgctccttggctcttgccgcaggccgccagcatgctcccgcacataaaaataacagcaccagtcattaaagtcttacccttgttcatcttaatacctcattagctaacacgcataacaaaaaatcttcagttaacgatgccgccgataaaccgggtgtacttaatactgtgctgttaaattatctttgattcactttgtctaaaggacagttaaaacatgacgcggtttgctcttgcagcgacaccgctaagcctgattgtattaacagtcagattaatcatgctttttgcctcctttgctaaaaataattgtttttatacacatttcttgcgtttcttatgcattatataataacactaattatcgtctttgcaagagggagtggcagttttttgacaattagggttgattcacttagaaattgcacaaaaacttactcaagtaagccatcccccggccaaaaatttactcaactaccaggaaaaattagacttgacaccttatcagtaagatttgacaaagagccgcaattttcttttatttatccatatgtagtctaactaaaatactttctaccttactacctaagacgctttggactaaccctgtcttcaatgtcaccaagccataaaagacaaccccagcacctacagctacaatcactagcaccaatgcattaaatctatgatcaggattgagaaacttgcctagtcccatttcacataatttaaccacaaggaacatgccaactgaaaatgctgtaactccagccagccttctactagttcgattcaaattaaaatcatactgcacttccaaatgttttaaagaaagtgccacaataattaataaacctaaattagtagcaaccagcggaccgtataccttaaataggaaaatcattggatattgcaggatcccttttaaaatcaatcctaaaaccaggtacttgatagccagtccatttcccgaaagaccttgcaaaatcgccatcagcaccgtaaataatcctaaactaatcgcggtaaatgacgacagatatagtacgttgctccccaatagatctggaccatagaaaactgtataaattggcctactgatggctgccatcccaaaagcagctggaatcattacaaataaaaataggtccatcgtattagcaatctgctttgaaatgctcttatagtctcccctagtatgcgccgctgataaaagtggaatcgcggttaccgccattgcactggccagcgaaacaataatcatgattaacttattagcattcaaaccaaacaaggcataccagtcctcaattgtatctgaactagcatgaactagactggcaatcatcgggtggaaggtatattggtcaaccaatgaaaataaggtaattcctgaatcaataataatgaaaggaattgcttgtgcaataatttcaccaaataattcagtcgttgagacccgcaagcgattattagaatgggcaaccaaataatctagttgttttcttctagaaaacaaaaaccaaattaataagccaattccaaataaagcaccaactgcagccgctaagtttgactgaataactgcatgaacatatgaaccatgttgcagtttcataattacaaacgccgttagcaacatccagactacccgggcaaactgttcaacaaactgtgacatcgcacttggcatcatatcggcataaccttggaaatagcctcgcatgatactcaaaattggaataattaaaatcgcataagacaagctacgcataactgcaacctgtcttggatcactttgactcccatttgaagctaaaagcggcgaagcaaaatacatgatcgcagctgagacaatacccaaaacggtcattaaaattaagcctttgcgaaataatttgcggccaatcccatattcgtttagtgcattatacttagctacctgcttagcaattgctcctggaattccggctgtcgagattaagataaaaattgtataaatgttataactacgcgcagtcaaagcattggcaatattgccgtaggagcccatccaggcataccacggaataatatacaaagcacccaaaattctcgaggcaattgagccaaaggtcatccatgcggaaccttttagaaaagtattttgtgtatctttgctatttaagttattttcttccattaaaattttcccaataaaagtctcaactaatcaattcaataaatctaaataataagtattcttattattttttaggaaaatctaacttatttagcaacaatattgacaatcttgtttggcacaacgataactttcttaacgtccttgccttccaagaacttctttacgtgttcaatttccattgcttgcttttgcaagtcatcttttgcagcgtctttaggagcttggaacttaccacgaagcttaccgttaacttgaaccataatttctacagttgactcaactaacttagctggatcataagttggccacttagcgtaagtaattgattcatcatgaccaaagacttgccaaatttcttccatcatatgtggagccactggagctaaaagcttaacaaagccttctgcgtattcccgtggaatggtcttagccttttgagcagcattcatgaagaccatcatttgactaattgcagtgttaaagtgtaatgattcaaagtcttcagttaccttcttgactgtttctgcataaaccttgtcaagttcaccatcattcttatcaacgattctttcttgtggaatggccttcaaatcaagatcgtttacaaagaggcgccacacacggtccaagaacttcttagttgaagcaggaccattgtcatcccagtcaattgatgcatcaagtggacccatgaacatttcgtacattctaagtgaatctgcaccatattcatcgatcacctcatcagggttaactacattacccttagacttagacatcttttcgtgattcttcaagattaagccttggttgtaaagcttctggaatggttccttagttggcacaacacccaaatcgtaaagaaccttgtgccagaatcttgcataaagaaggtgacgcacagcgtgttccgcaccaccgatgtaaagatcaactggaagccactttttaagcaaatcgtagtcagctaattccttatcattatgtggatcaacgtaacgcaagtagtaccagctagaaccagcccagttaggcatcgtgttggtttcacgcttaccttttctaccgttttcgtcaacaacatttacccagtcagtcaagtcagcaagtggactttccggggtaccagatggcttaatgtcagttgcatgtggcaagcgaagtggtaattgatcttccggaactaatgaagtggttccatcttcccagtgaataactggaattggttcaccccagtaacgttgacggctgaagtcccagtcacgcaacttgtagttaaccttcttcttaccacagttatggtcttcaagccattcaatcatgcgctttttagcttcttcattatccaagccgtctaagaactcagaattgaagtgcttgccattacctgtgaaggcttccttttcaatatcgccaccttcaataactgggttaactggcaaaccaaacttagtagcaaaagcatagtcacgatcatcatgagctggaacagccataactgcaccagtgccgtagctagctaaaacgtagtcagaaatccaaactggcacttccttgccattaactgggttaattgcataggcaccagtgaagacaccagttttatctttgttcaaatcagttctttcaagatcagacttagattcaattttcttaatgtaagcatcaactgcttctttttgttcaggtgtggtaatttcttgaacaagcttgctttctggtgcaagaactgtatagctaacaccaaataaagtatcaggacgagtagtaaagacatcaaaagtcttgtcgctgtcttttaccttgaaagtaacttgcgcaccttcagaacgaccaatccagttacgctgcatttccttaacgggttctggccaatccaaatcatcaaggtcttctaataagcgatcggcatatgcagtcatcttaagcatccattgacgcatattcttacgatatactgggtagccaccacgttcagttttaccatcgataacttcttcattagccacaacagtacctaagtctggtgaccagttaacaggaacttcagcttcatatgccaagccctttttatacatttgttcaaaaacccattgcgtccacttgtagtaatttggatctgaagtggttacttcacggtcccaatcatatgagaagcccaacttgttcaattgacgcttaaagttagcaatgttgttcttagtaacaacttctggatcttcaccagtcttcaatgcatattgttcagttggtaaaccaaatgcatcccagcccattgggtgaagcacattatagccttgtgcacgcttcattcttgcaacaatatcagttgcggtatagccctctgggtgacctacgtgaagtcccttaccagatgggaatgggaacatgtccaatgcataataattcttcttatcagggtcagtacctgtcttaaaggtatcatgctttgaccaataatcttgccatttcttttcaactactttgtggttatacaagataaactctcctttactatcaaaaaacgccctatgaaaaaatcataggacgaatcatcgcggtaccacctaagtttcacaaaattgtgacacttaattgctccttaacgcggatggcaacgctaggttttattaagagacgagttcacaattttattctaagacttcgcaccaaccagtctctctctgaaaaaaatatccttgttactacttctcgacctttattttcttatagataatgattataatttaccataaatgctataaatttcaagaggggagtacttttttgattaatacgaaacgaccacctaaggacaccttaatacctggtatctgcttcgtggttatttatgctgtctgggccgcactggtttcatccggctcacaatttattcacaattttgataatgctgtggtcaacattgtttgcaacaataatccagctaatgtcgcttttgctaaagattttactaatctcggcaatacaagcgtgatcacaattgaaacaatcattgttttcatagttttactggtctttaagcaatatgcatacgcttggtttaccgctggtgtcatgatctgtgctaatggctataattggattatcaaacacgcagcaatgcggcagcgtccaacggtcaagcacttagtttatgcggatggttatagttttccatcggggcactcagttggtagcgcggcgctatttggtgttttgattatcctaaccattcttttagtgagaagcaaattctggaagactttattgattattatttgggctttattcccactgatgattggttacaccagaattttcgtccacgtgcactatccatctgatgtattcggcggttggattgaaggaattacctttgtactgcttggttattccttcctctatcacttctacattgagccgaagatgatcgacatgaaacgaaaacaatagaaatcaaagcaatttaaaaggcatcgcatgatgcctttttctttatcctatttttgcttgtaaatgcgtcttttgaaaaattgaaattaggttttctaacgctggcgacttttccccgcttttgctagtaatgaaaaagacaacatccattaactttcgatctagtggcaacaagttaattggcgtttgttccattcttctgataatacttgccgaagaaatggtaatacccacgccgtgaattgccaagttagttgcagtaataatactattagactccatcacaatatttttttcgagtcttaatctctgaaataagccattaacttgatgccggatagctgaaccaggtgaactcaacactaaaggctcctgcagtacctcttttagatcaagttcatccgaatttaagataaactttcctgcttggtaatatggtgaggctggcgaaatcactacgtaatagcgttcctcgccacccgcaaccacatctaaactcgagtcaagtgcttctggcgtctgaccaatataacaatccagctcgccattaagcagtcttctttcattttctctggggaaattttcaaatagctgaatcttgacgttggggttttcttgcaaaaattgcggcaaaatttctggcaataaatatgtacctaagctctccaaaatgccgattttaattatctgttggtcaggatgagtatatgcctccagcttgcgccctaattgctgcttattatatgaaacattctccaaatattgatagtaaattagacctgcaggagttaacgtatagggtctctcatctcggttgatgatcttagtgcctaattttttctcaattcgtccaattagctgcgttaaataaggctgggaaatatataattctttagctgctctggtaaagttactctcttttagcagaacatctaaaaaatgttgtaattcttcaggattattcatgatcaagcccccgttatctaaaaaatgatagcttcacagctatcattatatcttatcgactaggcgtttttcacaaagtctgctagttcttcttcagaaaattcattgccataatcttgttctaattcttgcaagatttgcttgggactgcgcttcatccttctaagcatgttaatcgttttatggattgctgcaacagttgcctcatgtatgccttcttccatgccaagctgctttgctgcttctgctacttcttctgtgttcatgacgtgttgcctccattcttcggttctacgataattgttcatcgactttttaattcgactgacgagttttccatttgaagttggcttgccttcaatcatgcgataaaggtcatcaagctcaggtctgatcttgccttttgttccctttgtgtttaaatatattatcgcagaatcgtcatttaattcaactgatgggtcttccttagcagtataaacaaaagtatatcgcttcaagccttttcctttgggatcaaacggcagaataaaaattacatatgcagcgtgcagctcgccatattcttgttttcgtcgtaaaaagccatcttccatcatcttgaacaggtattgcctggctcgtttatccatgtctgctttatgcgcgacctgcatttccacattgtaacgcctgcctctgctatccgtaatcaggacatcaagaatcgaaactttctcttcttggttaaaagcaatcctttcttgcgtgcatacagtgatatcttgaatgtccaaatgtggtagaacctcattcaaggacatacgatagatctctggatctctcataacattctgaaacatcaaatcatccgtaaaacctaatgcttcagacacatttagttctttctctttgctcatgcaaagtcctccttaaataatttgaggatatttatcctctattatttattacgcaaaaaagtcgcaaaattttttgggaagttagaaaagttactattatttttgttagtaagaattagaaatcatgggtttttattcgaaggtaaggaaaaaatgactccaaatagaaatacagacataccaatatttaaattgatatatctgtatttttttatactctatctttatttctgcgaagcgccagtaataacatcggtaacatgcttatcctcataagcagtattggcagcaattctaccaaaggtaaagatatctgctaaagaatttcctcctaaacggttaccggcatggataccaccagcattttcacccgctgaataaagaccagcgatgatttgaccgtccttatttaaaacatgagccttagtgtcgattactaagccacccatagtgtggtgaatagcaggtcttcttggtgtgacataaaatggcgcaacttcacactttagtcctaatacattcattactacaatcatgaaagaattaaaacagtactaaaaaaccatactccgatagaatatcgaaatatggttttaaataaagcagttcaataatatgtcccaaatttggggttcatatcaaatcaaactgaagtgattttttattctcttttattttcaattttagtgatagaagtcaaattgaccaatcgccattgtttctttaataccaccagtttcaagaaccgacttatcaatggtaatcttcttaagagttgctgcaaagtatcctttaaaagcatgccccattgccaatcctgcggcttctgaattacccaagttaactactacacctaagtcatggtaagcatatttatccggtctagtttgacccataattctgctcttaatatcttttgcagcgtagttagccattgaaagagccaattgaccagtgttaggatatggccatttcttaccaggaaccatgacgcttgaaacatcgcctaagacgtagatatcatcactttctggcgcggttaaatgatcaccaaccatgacccgaccacgacggttcttaaatccagatgcctcaattactggactgccactaaagcccatcatccagattctagtacctgccttaatttcttgcagctcagcattgtctttttcattagccattttatacaaaaccgaggtagaggttacttcattaacataagctggcttaataatttcgactttatttttcttaattgtgtttaaagcgtaatcaagcaatttaccttggaacattggcaaaagacgtggcgaaccatcaatcattctgatggtaatttcatctggttgggcgccagccatttgagctagttctgggcgaacctttgcaatggcatttcctaattcaattgcttgaaaacctgccccacaaattactactgacaggtgtttagaatcatggtcttggcgataagctttcatttcgacataaaggtggtcgcgaatagcttcagcttgttttacattgctcattggcaaagcattttcggttacacctttaatgcccatattgctcaaggtaaagcctaagccaacaacacaatagtcatatttaagtggagcatgatcctttaactcaactgttttatcagcaatattaactttttcaacttcatccgtaatcacagtagtcatcttcggattaattacatcattaatttcatatgacatcccagtgtagggaatttcaccagtagccacttcatataagcgaattgtttcgtagtggtatggattacggtcaactaagataatcttaacttgttcacgcaacttcttttgcaaagcgacaactgttttcaagccggcaaaaccagcacctaaaactacaactgttttcataattttcaacctctctaaaatagaattcctaaaaagtaagttattaagtaagtcagtgaaccaactagcaacgtttttactcctgtgataaatgtctctgtcttaacttgtttaccaattaagatcttgttctgcttataaacgaacggtacaattattactgttaaccaaaccgtcttaggagcaattcccaaaaacggtaggaggaagattactaaaaatgctaaaacatttttgatactaaaagcaatcaagccaccttttttaccaataaagtgaataattgtggtgcggtgattatcctcgtcctcttgggcatcgcataagttattagctagcattaaattagaaatccataatttatcagctaaagctaataagaagatacgaccgattgtgatccagttccaatcaaaagcttgaaaactattgatataaacactgagcagtacaatcatgaagcccattgtgaaaccagagaacaattcacctagtggcaagctggaaataggatgcggaccaaatgaatataaataaccaaccataaaacagaacaagcccatccacaatacaggcaagcctactttagcgactagatacaaacctaataaaattgcaataagactaaaggaaataattaatcccagaactaaattaggtgaaatattttctcgcccgataatgttagtcttctcttggtaattcttgctatctgcgtgataataatcacagtagttatcaaacatatctactaccatgttaaatagtagcattgcaatgaagaagactagggcaaatccccagttaacttggtgataataatacacgctgtaacacatccctaagaaaaagggaatgacactagcggtttttgctttaatctcaattaattctaaaaatacacttaatgacatcgatccacatcctttcaaaggatcactattctgttaactctattataaggaaatctatcatgaataactctcaaccttggcaaaaatatccacttattcgtaaaccgcttgaagaagttaatcaattaattcaggcaaccatccgcactccatattcagacttgcaagatgcactccttgaaatggctagtaacggtggtaaatatttacggcctagtttactaattttgtcagctcaaattgctagcaaaaaagaaactgtatcaaaacaaattattcaacttgcctcatcaatcgaaattttgcatatggcctcattaattcatgatgatatcattgacgattctgacgagcgccgcggtaaaattagcatccaagcccgttttggcaaagacaccgcagtttacgctggcgacttgctttttacgcacttttttgacctaattttgaacgccatttccgaacaagattacatgatcaaaaatgctcacacaatgcaccatttacttgctggtgaattaggccaaatggctgaacgttttaacctaagccaagatttcaacgactacttaactaatgttaaaggaaagacagctgcactttttcgtttagctgccgaagaaggaagccattttggcaatggagatgagcaaactactcaagctttagcctcctttggtgaaaatttaggcattgcttttcaaattgttgacgacattcttgattacactggcggcaagcagctaaacaagccaacgctagaagatttgactaccggcgtctactctctacctattctgctagctcttagcaaaaaggaattacgagagcaattagtaccgctacttgaaaaaaagcgacaaatgagcaaaaacgatatcgaacaaatccaaaagattttgctaaacagctcagtcattgaagaaactcatgccttagctgaacaatacactaatcgggcattagctaacttagcccaactgccgcaaactaatgcgaccgtcttgctcaaaaagatgacgcgtaaattagtcaatcgaacgctttagtctttgcgtcccaaatgaatcgcacctgcaccgtaagttaacttagtaaccgctactcgagtaaaaccattttgctcaagtagcttttttaattgctcagccgagagaaattctttacttgtttttgacaaatactggtagtccttgatattaccgtgtgtcaacttagcaaaatacggaaaaattttaaaataagcttgccagcccaatttaactaatgcattagtgggctgagacatttctaaaacagcaaattgtccgcccggcttaagtacgcggtagctttcctgaatcgtcttaacagcgtcagggacattacgcaggccaaaacaaatagttacacaatcaaagctattggccgcaaaaggtaaattcattgcatcccctgcaatcaactttatcttggactgcagctgcttttgacgaatctttttttgggcaatcttcagcatctcctggttaaaatctagaccagtcactaatttagcttttttagtcaaatcaatagttgaatcagcgctaccacaacacaaatctaagcaaatagaatttttatttaaatctaactgccgtaaaaatttcttacgccaactcttttgaatccctaaactaacaatattattcatcaaatcatacttaggtgcgaccctagtaaataggtcatgcacatcttgttctggcactttattcgttagcataatgaacctctataatcctaaatcagcctttttcaattcacgataacgcggctctgtctgccataatttttccggtgtaccctgcatattaatttgtccatcttcaataaaaattacttgatccatctgatcaattccttgcaagtggtgtgtaatccaaattaaagttttaccggataattccttaataaacatattaattacagcttgctccgtaattggatccaagccaactgttggctcatcaagtaagacaattggcgtattcttcagtaagattcgcgctaaggctaaacgatggcgttcaccacctgaaaagcgtaatcctgcctcatccaccttagtatcaaggccatccgttaatttttgcaccatctcggccaaacctactcggcgcaaaacgtcccatagctgctcatctgtggcatcttcattacctagccgcaaattattggcaatcgtggtattgaacaaatatggcgtttgattgatgatgctaaagtaattggacatttgatcgccaaacttgctggtatcaattccatttaaagttacgtgtcctttagctggtacccgatcacctctgagcaaggcagctaaagtacttttacccgcaccactacgacccaaaatagcaatcttttcaccatcatggatatttaagttgatcccatgcaaaacctctttattagtttgagggtaggcataatgcacatcagttaatactaaattaaacggtgcggttaatttgattggtttatgcttagtccgatcaggagctggcaaattattcaaacgcttaagcgaatctttgtagatattcgtctcttgagcagcagtcggcaaactggcaaaagcctcaacagtcgggaataatgccaaagcaaatgccgcaatccaattagtataataagttgaacgcccgccaaatctggcagcaccccaaattactaggctcacaattaccaacacccagaagatttgtaaaacaaagtcgcgccagcgatcaaattttttcatcttcgcgttgatttgcaaaaatttatcttgatcattgacatgcaaggccaagtattctttgctgcggccagacaaaatccagtcatctactcccatcacattatcagtcaaatcaacgtagagcttgtcttgaaccgttttttcatagctttgccgcgcaccattgattaagactgaccaaataggaatagcaaaaataatcaagaaaaacaggatcaacatccaaatgcccatcagtggggaaatgatgcctaagccaattacgataattgcatacaagccccaagctacaaacattggaaagatcgttcttaggtaaaagttttgaatatggctgacatcatcagacaaaagtcccagaatatttcctagctgatacttactattaaaaatagtcgcatcgcgctccaatgagtcataaagctgttgtctaaatttggaggtcattttgagcacccaattgtgactaaccagccgctcaaaataacggacagctggccgcgtaatcccaaatgctctagttaagacaattggcacatagattaacaaaatattttcaggtttagctgctgaacggctgattaaatagccagcacagaacatcaagcccccgccacagacgaaagttaaaatgcccagtgcaatcgccaaaatcaacgttttacgatatttttccaaatatgggcgaacccaacgatcattttttaatgctcttaaaaccggaatcttattgatcattgttttcacctctcattcctgccattaacttgcagaagtagccttgattttgctgcaattgctcataacttccttgctcaaccaattgaccgtgatccatcactagaatatagtccatttcttttaaccaatgcagtctgtgagtcgcaaagaagaccagtttattttgcattaatggcatcatccgcttctttaagtcaatttctgtttcgatatctaagtgagcagtcggctcatcgaagatcataatttttcgcttaggatccaaaaatgctctcgctaaggcaattctttgtgactgacctccagacaagacacgcttaccgcggccaatcaccgtatcaagtccgttaggcaaatcatttaacaaggcatccagacccatgatatgaatcgcctgcttaatttcatcatcacttgcctgcggattataaaaagcaatattttcacgcaagctcttagtaaaaacgtatggctcctgcggaatataggtcatttgacgctgccaagcaggaatattcatggtcgtagttttctgcccttgtagttcaatttgcacttgatccggagtcaaaaagccgctgagcaggttaattaaactagttttaccagatccgctcattccgataatgccaattttcttgaatccttggacttgtaatgaaaccggtccaatttcggttcccttttgataagtaaacttcaagttcttgatcttcaattgatcttgagctgaccaagtttttaaaggtaaatcattagttttttcctctggcagattaatcaattcgttgatccgcttaaaggcatttttaccattcaaggttgcatggaaatcccccgcaaaatctcgaattggcaaaaaataatctggcgccagaatcagaattcctaaagcaggaaaaagtgcaattttaccattcatcaagtcaaaaccaagaaaaacagcaatgattgcaatagacaaggtagtgaaaaagtctaaggcaaaagttgaaagcattgctacttttagcaccgccatcgtcttttttctaaaaccctcactcaagttaaaaattgacttggaatatcttttactcaggcctaaatacttcagcgtatcaattccccttaaagaatcaataaagttattagataaaacctgaaagttaccaaattgtttaattgctcgatcctgtgcagcatgacctaggataatcatgaataagacaattaaaggatacatgactagcagaatcacagctgatgtccagcttaaaaacagcatgccgacaaagattaaaactggcacaatcatcattgttaaaactttgctgtagattaacttaatgtattgcctgacctcatcaacaccatctagggacatagtaatcaaactaccggttccttgtttttgtactaaagcctgtccatcacgaaagactttatttaaaagctgctgtcttaattcttctgcaacccgaccggaatatttttctaacattgaatctctcagtgtgctgatcaattgtctggcgataaagcaagctgcaaaagtaattagtagtagccaatcgagaggttgacctgcccacaatttgcttaagactgacgctagtgccaaggcttgtcctactataaaaaaagcttgcagaatctcaagccctgcaagtttttttaagattgaaccagcgccatcaattttaaatagctgtttatcaatcattatttaacctctccgattcttggcattgaaatccgcttgcgaaaaatccaatatgcccagatggtgtaagccaagacacatggtaccaagatgcaagtagcaacagtcataacaatcaaagtgtagttagatgatgatgcactatgaatcaacaaatcatatttactgctgattgatgaaatcattactcttgggaataaaccacagaagattaaggcgaccaatgagatcaacgttaatccactgcaagttaaagccattccttgcttgttagtgaaagtagctacatgtgctgctacagagaaaccaacaattaatgctaagcatactaaagttgcaattggatgtactctcatgaagtcggtttggaaaatcaataataaagcaaagacaacttcaccgacgtagagtacccagtataaagcttgtgcatagttttgtgctctatctgaaataacgcccttagttttaatagtaatatagtttaagccgtgcaaatagcaaagaagtgttaaagcaataccaccaacgattgagaaccagttaaagtagtcaaagaagctagctgaaatattgcctttagcatcgattggcatccctttaatcattgagataaacattaccccaaagagaaaggtggccattacgctaccgatcgccattgcattatcccaaatatgcttttgatatggagcacattttgctctaaattcaaatgacacaccacgaataattaagccaactaagatcaataataaaattaaatagtaacctgagaataaggttgcataccagtatgggaatgatgcaaacattgcaccaccagcagtaatcaaccaaacttcattaccatcccaaactggtccgattgtcctaacaacttgatctctttcaggttcattatgagctaaagtcttcacggccattcctaccccaaagtcaaaaccatcaaggaagaagaagcctgagaacaatactccaattaagataaaccaaagtatttgtaaaaatgacattttaaatggccccctttgagaacggatcaactactttgcttgcctcttgagccttatcatattcatctggatcgttgtgcatgaagcgaacaaccaatgcaatcatgataattgctaaaatagtaaataagcagaagtaaacaatatttgatgttaaaagtgaagccactgaaacattcggtgaaacactttgatcaatagtaaataatccataaactgtccatggagcacggccaagttcggtaattaaccaaccggcagtgttagccaagaatggtgagaatgtaagaagtgcgaagatccataatagccaacgatggttataaagggtttctttattcttacgagtcatgattaaaccaacaattgccatcaagaataataatgcagcaaaaccacacattactctgaaggaccagaataaagtattaactggtacatagtagtccatcttgcgaccatcaatatgtgtaccatacttcttttcaagttctttgttaatttcttccataccttttacagaaccagtagtcttgtggtaagaaagaatacttaacatgtctggaatatcaattcccttaacttcatgggtctttggattagcaattgcaactaccgtccatggagccttttctccagttgtcttataaacagcttcagttgcggcgaacttcattggttgatcatgcaaagtatattgcatttgcatatcacccacagcaatttcaccagctgagaaaattaacattaagattaagcctaaacgcattgtcttacgatagatcttcttgttaatgtctgaaaggttacgtttcttcaatagttggaaagcagctaacccagtcaaaattgtagtaccagttaaaagtgcaccaacaattacgtgaccatattcatacattaattgtggattcttaagaagtgctccaaagtcagccatttcggcacgaccgttgcgtaaagcaaagccgacgggatgctgcatgaaggagtttgctgttaaaatccataatgcagaagtcattgtcccaaagacgatcatccatccaaagaataagtgtaatttcttccccactttatcccaagtaaacatccacaaaccaataaaggtagattcaataaagaatgacaacaatgcttcaaaagcaagtggagcaccaaagatgtcccccatgaatctagaataatcggaccaattcataccaaattggaattcttgaatgataccggttacaacaccgacggcaaaactcaataaaaagatattagcccaaaacttggtcatctttttatattcaggcttgcctgtatgaacatacattgattccataattgcgacaacgaatatcgtaccaattgaaaatggcacgaagaaaaagtgaaagatcgtcgtcatagcaaattggaatcttgctaaactagtaatatccatttttacgcccccataattcctactcgcattacaagtctctgccaaaaaataacgttcgttattcagctcaatttaagtgtacagctacttagatttactttcaaggaggcaaataatgcgctttcaatagtgttatcttatttttaggccactttccatttataattatagcattgtcaaatatagatttattccaaccgcaaaaaaagtactaaaaaaggaccaaactggtcctttttttctttatttttattattttcatcatgaaaatatttttgattttttaaaatttatttagttgttattttatagattctacacttttaattgattagtcaaattttgcgtagttttcattttcatatttagttcttttaaatttggcgaaataagactcaaatatagcaagctagaagcaaagatttctgcaaatagtgaattaacagcgccgtaacgcaacaatttttcatttgatggtaacgcaattatagtatcagcaatatcctttaagggcgaattctgggcacgagttactgcaattattttagcttgattttctttcgcctgttttgccattagcagtggttcttgagttaatccactataagaaaaggtaattaaaatatcttctgtcttaatattagctacttgctctaaagcaatgtgcgaactttggacgaaagcagcatcttttccgctacgaattaatttgtaaaataaatcctgtgcggctaagccagatgcaccctctcctgctacataaatcttctgtgcggctcgcattaattgtaccgctgaagctagagattgatgatcaattgttttgccaatgtctgcaatatttttttctaaactaatctgtaatttgtaaagcacactggtcggctcatcattttcattaataattgtatccaccgtattatcttgcttgccaggtatttcttgtgcacaagctatttgaaaatctttaaagcctttgaaacccaattttctacaaaatcgaatcactgatgcgccacttgttttagtaatagcacctaattcctgcaagtttttacttaggaaaagagttgaatctttaaaataaacatcagcaatcaacttagaagttttattcaaattaggatatacatctgaaatcttatttgccaaattaagcataatatcacctttcttctatgtcagccttctaaaaatgattttcgtactcgaatcaataaaatcaagcaacttcacatactcaggtgaaataaaaccaatcacattactacgtgcttcaaaaggtaaatttgacttaatcagactaacttcaccactatatctttgagctaatttgttttgcattgtaatagtgcctttacgcctatttaaagtattacaaattggaatatcaggttttctaggcaaacttaagcgaatcagcttttctggcatgtcctttcttacttcaatcacttgatcatacagctgttgatattgtggcaatagcgaacattctatgtttaaaatattatctttttgataatctacaatataccgaagatttttgattgatgccttgctatcgccaataaacacatcatccacatttgcttcatgaattaattcaacagctgcaacgtaaggcgaaactccacgatgcttttctacagttggcaagccttcatatagtgggaaacgtttaagtgcatccccaggaacaaaagcttgagttcttaagccatagtcctttaacatccaattcttacgtttaaaatctgtccatcccatacctgtatctgtatgcggataaaaattatatgttaaagctaatttaccaaaatcaacccctgcatttctggcacgatctaaatagtccagtgacacaacacttgcatttaataaaataaagaaatttctttgtagctttttgattaaatcaaagtcatcaaaaccataatctaatcttaaggccttgaatcccttatcttttaaggcttcaaaatcgcctcctttaattcctagcttttccaatgtagccggagaaacatcaggaattacttcaagtcccaattcatcgcacaattcaaaaaatctcggtaatttttgatccagatctgaataatcttcttctggaatctgaagtgacgtaaaaacgtattttgcaccagcttgagctgcttttttcaaatagttttcatcataatcttggaaatatacagatattcctagcattttttcttctccgttaaaaataaaaatcattgtaatagttacaatgatttcaattacttctttaattttatcattcaggaaagacttcattaattcttgcttcatctattccaaagaaccatgttaaaacaaagccacctacataagaaattaacaaagcaatcaagaattcaacctgttgacctggctgcataattaacagtccaaataatccagataccccctgtgagacagtacctaaatggaataatgatgatgcaacaccaccgaaaccagcaccaagacaagccgtaataaatggacgtcctaatggtaaggtcacagcatacattaatggttcaccaactcctaaaatagctacaggaattgaactcataaccatatttttaaaacgcttatttttgctcttaagccaaagagcaaaaccagcaccaacttgaccacctccggccatcattaaaataggaagtaaatagttaattccatgagttggaccagtagggtcattcagcataacatgaattggcgttaaagcttgatgcaaaccaacagatactaatgctaagaaagttgacgataaaatataaccgccgaaccagcttaacttatcatataagaagtccatagccacgtaaataatattggttagccaaccaccaactggttgtaagaaaaccactgaaattaaaccacaaaagatcagggtgcaaagaggtgttaagaatgtatctaaagcattaggcataaactttctaatctgtctttctgtccatgcgataaagatccccataaacagtgcggtaagcaaaccaccaacaccagcaacatatggcttattagtgaatggcattaatactgccagtgaatttaaagggtacgcagcaaaacctgttaaatttaaacagaatacaccaccaattccacctagaattgcactacctttaaattctttagctgcattcatccctacaaagattggtaagaatgcaaatagtccccatcctattgttttaatagttaaataccaccaatcattggcaaaagcactaccagattgataatcaataacattgcagataccattgactaaacctgcagcaataattcctggaagtaaaggaataaaaacattagcaatatgatgcaatccacgttgtaaaggcttatcatgtttagctttttgtgccgctttatttttttgagctctagctttaacttcatctaatgtttcattggaatcatcgccgccttcttctccaagtggcacaccggctaatttactaaattcagttccaactttagtaacctttcccggtcccagtacaacttgtaaagtttcagactgaactactcctaaaactccattaagccgctttaactgatctaaattaatttttgaatcatctttaacactaatccgtagacgagtcatacatgaaataactgcggaaacgttgtctttaccaccaatatcattcaaaatgctactggctaattcactatctttgctcattttttacacctcctaatttaaattatctaatgcccattgataagcttgtggagctgctgaagtccaataagcccaattatggttgccaccgttgtctcttacaaacttaacactaatgtcatggtttttaagagttttcacaaagcgatcgacattttttactggaacggtagtatcacttgaagtagtctctacaaagaacttatctttctctgatttactattaatgtacctagttggaaatacactatcataaaatttccaatcccagttactttttccatcttgaaaagcatactgtgaagttttaattgggttgttattcggcaagcggtaccaaactgcaggagaaattagaacaccatttccaaaaatatctggatatttcaaagccaatctggcagcaccatatccacccattgagataccaccaatacctacatgtttaggattggtttctgtcttatacaatttattaatagtagggaccatgtcatcaacgatggcactttccatctgcatcccaccttgcttttgattaatataaaagctattaaagccatcaacaaaaactacgatcatctttttattacagcgatgaatttctccatcaagaatttgttgagaattaaatctttctagcaagtttctatgattaccatagattccatgcaacatatataaaacaggatatcttttactgctttttggattgtaacctgctggtaaatatacatcataattccaatccatatgtaattttttcgaatacatagttgttgtaacaacttgactcttatgaggtgtaacagccggagtagctgtagcctcttttttctgactgcatccagttaagcctgctcctaaaagtaaaactgaaagagcaactaataaaaaattgcgatgtttcattattctccctcccttacttattactaatattcattagcaaagtagtattatcaaaactcttttgaaaaagcaatcactaatatgcaatttttgtacaaatagaaataatatttcattgttctttattagtaagcgcttacttaaatataaaaatatcacttttaagacatataatcaatgatttttgaaatttaatttcaaagtatagctaattatttaaaacttggctgacattgttattatttttttctaatagtttacttgcatcatcactatttaaccctgtttttgccataacaattgctaatcctacatttttatcagctttaagcaagacatctttcgcctgctctattgatacgttagtaactgacgtaataattctaattgctcgatttactagctttttattagtaggcaagacatcaatcataacattttgataaacttttccttgtttaatcattacgcccgttgaaatcgtatttaagatcatcttttgtgcagttcctgctttcattctagttgatccagtaattacttcaggccctactacagcttcaatagctatttctgcatgttttccaattaaactattattaacacaggcaattgaaattgtccctgcaccgattttttgtgcatagtctaatcctccaataacatatggcgttcgaccactagcagctaatcctagaactacatctttactagttaaatttagcttacctaagtcttcagcagcaagtgattctgaatcttctgcaccttcaacagctaaatacattgcagttttaccgccagcaattaatcctattgcacgatcagggctaattccatacgttggtactaactctactgcatctaatatacctaatcttccactagtgccagctccaatatatattaatcgtccaccatcatggtatttcttagaagccatgtcaattgcctgagcaatttgctcctcctgagttcctactgcttcagcaactttctgatcttctttattaatagttttaaccatatctaaagttgacatattatcgatatgcatagttgcactgtttcttttctctgtagttaaatccttgatattcatattaatcattcctttcttttaatttttcgagaagctttcctgtagcctccatttcttgttttacctcacctaaatcacttgaaattgagcataaataaagcacatttgaaataaacatttgagcaaaagttgaatttatagcaccaactctcatcagcgattcatgatccggtaattttaaatttatatctgctaatttactcaaaggggattcggattttctagtcactgcaacaattggtgttttattttttttagcttgtttaactgcaagtaatagttcctgagtcaatccgctataagaaaaacatatcatgacatcttttggcgttgaatagtatattctctctaatgcaatgtggacatcatcattataaaaaaccgtttttccacttctaatgagtttataaaaaagatccttagcagaaaagcttgaagccccaataccagctatatacacagctcgactttttttaattaaggatacagctttttgtaaatccttgatatcaatagtcttagataaatcttcaaagttttgactcaaactaacccttaatttagtcataacttcatcagctttgtcatctttagttacaatcatatctattggcttaagttgtgactgtttgacagtactttgagctaaatcgatttgaaagtcctttaaccctttataatttaattgcttacaaaaacgaattactgatgctgcagatgtattagtataattccctatttctttagcatttttatttaacaaaatttttggattttcaagtaccgcatcagcaataatacgtgatgatttttttaactctgtataattctctaaaattctatctctaacattcatttaatcaccttgcttttaactctattttactttcatagaaataatatttcaatatatgtagatataataaaaatactgaaattaaatttccagtaaaaaagccacatgctctactttgcatgtggctccttcaacttaatttttcttcaattttcgatctcgatacaattgattcaatacaatcgagactacaataacaatcatagaaacaacgtaaacagcttttaacccgcctaacaaaacttgccgtaattgtggcactacattggcagccagacttttggcattttctgcagaaacaattttattcatcatttcttgattcaaccccgatctcttgcttaacccatgcgccaacatcgtattaaaagcaatcccgtagatagaaaccatcattgtctgtcccagatacttcatcagcgtattaaacgaagtggcaacgcctatgtcatccttaggtaccaaaacctgcgatctcacctgtgaagctgtcgtaattgccccaaaggcggtcccattaaaggcagcaataacacagaagacccagaatgatgtgtaaatcggcactaaaatcaaaaccaaatcggccacaactaaaaccaataacatataatcatatgtctttttaatcccccagcggcctagcatcccgccaattaagaacgaacctacaatccacattaatgaactaggcgttacagcaaaaccggctagagatggattagtaccattaataccttgcatccaggtaggaatgtaaaattcaaagccgattactacgccagaaatcaataacgtaatcaggttaattgcaaggaactccttatcttttaacatagtgagtggcattattggatcaactgcgcgcttttctgctctaaagaacataattatactaattaccactaaaacggctagagcggccattatggcgatattagtgtttgaacctaaatcttgtaagaaaaacatcaaagctagcaataaaattactaaccaaatggttccctgcaaatctaacttagacttagagctatgtttaggctcttgcaaacaaaaaattacgagcaaaaaggcaattattccaattggcacattgatgtagaaaacccagtgccaggatagatgctgaactataaagccacctaatagcggtgcaataactgatgctactccccaaaaaccagagttaagacctaacattttcgctcttttttgcagagcatataaatccgcaataatggtgatggcaactggctgaaccgcgccagaacctaatccctgaattactctgaataagataagctccaccatattttgtgcaagtccacacagcgatgagcctatgacaaacaacgcaattccaaacaaaaaaactggcttccgcccaatgctatccgccagttttccatataaaggagttgaaacggccgtcattagcaagaaaattgatataacccaattcataatctcgagcccatctaggtcagaaactatggttggcattgcagtagaaacaattgtcccttcaatggcagtcataaaagttgtcataaaaatcgcaagcgtgactataggcacgtttgtttttttcattcttttttactttctctttttatttattgcttatttttaatataatcaagcaaatcttgtgttttatcagtcttttcccatggcaaatcaacgtctgttctaccaaagtgaccgtatgcggccgtttgttcatagattggacgacgaaggtcaagcatcttaatgataccggctggacgaagatcaaaaacattgcgtactgcttcagttaacaaatcatcgtcaaccttaccagtacccgcagtatcaatcataattgaaactgggtgagctacaccaattgcataagccaattgaacttcacagcgataagcaaggccggcagccacaatatttttagcgacataacgagctgcataactagctgaacggtcaacctttgttggatccttacctgaaaatgcaccaccgccgtggcgagcgtaaccaccataggtatcaacgataatcttacgaccagttaaaccagaatcgccctttggacctccaataacaaaacgccctgacggattaatcaaaaacttagtcttttcatctaggtacttggccggaataacttccttaatgactaaatcaatcattgcccgatggatttcttcattagaaacttctgcatcagtttgagtagagataacaacagtatccactcttaatggcttattgtttccatcatattcaacagtgacttgagccttagcatccggacgaagccaatctaaagtatggtcttttctcaaagcagcaacacgtctcattaaacgatgagcaagcgaaattggtaatggcatgagttcaggtgtctctttaatcgcaaagccaaacatcaaaccttggtcaccagcaccaatttgatccaattcatcgttatcagacttgttttctctagtttcaagtgagtgatcaaccccaccagcaatatcaggtgattgctcatcgatgtcaaccatcacagcacagttattgccatcaaaacctaattctggacgatcatagccgatcttcaaaatagtcttccgcactacatcttgaatatcaacataagcgttggtagaaatttcaccaaagacaaaaaccatcccagtagttacgatcgtttcacaagctacgtgtgaattaggatccttctttaacatcgtatctaaaattgcatcagaaatctgatcagcaactttatccggatgtccttcagaaactgattctgaagtaaacaaacgtctttccatattagtccccctatatagacattggctattcggttacaaggcatcttcactaatcatagtgaatcctctcaggacttgaaccgataaaataataattttgcttgttcgttctttttgcataaaaaaagactaccgcggcggcggtagtcccgaacaatggaggatacagggctcgaacctgtgacctcctgcttgtaaggcagatgctctcccagctgagctaatcctccattagtgacccgtacgggatttgaacccatgttacggccgtgaaagggccgtgtcttaaccacttgaccaacgggtcatatctcttaatcaagagcactttattataataactaatcatgttttaaaagtcaagaactttttttatttatttttattagttattaccaccgtgatctctcaatcacaacgtttattatattacctgatagtccctaattatgcaatagttatttttaaaaaatttcaaataatttttgataattcgctttcatccagtaataataactaattccattaggcattgtttcccttacatcgagaactggaatattatgttgctctgctagtttaaccatgccactaactgtactacttgatgcttgaatattattaacaaagaaagcaatttttctagctttaattttgacttgcatctcatgaataacttgcgcactcggatccgtttcattttctacagcttcttcaaatgcctgattgccaatcttaaaatgacaccgttctagtgcataatcaaacacgggctcactaacataaaccggtttatcttcacgcccattaattttagcagcaattttctttatactatcaatcttttgcaaatagcttgcagcattagacttaaaatatgctgcatgttttggatcaattttacttgctgttttaactagataatcaacatactttttaggcatgtttaagttataccaaatatgaggattatccccctgttttaatcccatcaattgattaccaactttaaccacatgaatatcattagcattggctaaattagtcatccagtcatcatatcctagaccgttggcaataacaatattagcattagctacttctttggcagagccagtcgtaggctcaaaatcatgtggatctgtatcgccgttttttataatagcttgtacatgaccatgtttaccaactatatttttagcaatatctgcataaatattagtagaagttacaatattaactctatgcttagcagtattctcttctccctttgtcgaacaagcggaaaatgttatagctaatagagatattaaaaataaaaatggaattagttttcgtagcttcacgatatttcctccctttctccattatatatgaaaaattaggtagaaaaaaaggaactatgttaacatagttccaattcatatatatttacggaatgtgagggatttgaaccctcgatacaggtataagcccgtatacatgatttccaatcatgctccttaagccgctcggacaacattccatacaaagtactccggctgtcagactcgaactgacgacatcttgattaacagtcaagcgctctaccaactgagctaagccggaatattaaaaaagagcacggcagcttcctttcctcgcaggcagttgcccaccaactactttcggcgttaagaagcttaacttctgtgttcggcatgggaacaggtgtatccttcttgctttcgccaccgtactcttttgagcttttacactcaaaactaaacataatccttctcgcaaaaaaccttccagtttgcttcgctttggtcaagtcctcgactgattagtactggtccgctccatccttcacaggacttccactcccagcctatctacctcatcgtctctgaggtgtcttactgcttacgcaaaggaaatctcatcttgaggggggcttcgcacttagatgctttcagcgcttatcccttccgcacatagctacccagcgatgctcctggcggaacaactggtacaccagcggtgcgtccatcccggtcctctcgtactaaggacagctcctctcaaatttcctacgcccacgacggatagggaccgaactgtctcacgacgttctgaacccagctcgcgtgccgctttaatgggcgaacagcccaacccttgggaccgacttcagccccaggatgcgacgagccgacatcgaggtgccaaacctccccgtcgatgtgaactcttgggggagataagcctgttatccccagggtagcttttatccgttgagtgatggcccttccatacggtaccaccagatcactaagtcctagtttcctacctgctcgagttgtctctctcgcagtcaagctcccttatacctttacactctgcgaatgatttccaaccattctgagggaacctttgagcgcctccgttacactttaggaggcgaccgccccagtcaaactgcccacctgacactgtccctggcctggcttacaggtcgaggttagagcatccttcaaacaagggtagtatcccaacattgcctccaataagactagcgtcctatcttctctggctcctacctatcctgtacatgtttaaaagatactcaatatcaagctacagtgaagctccatggggtctttccgtcctgtcgcgggtaacccgcatcttcacgggtattataatttcaccgagtctctcgttgagacagtgcccaaatcattacacctttcgtgcaggtcggaacttacccgacaaggaatttcgctaccttaggaccgttatagttacggccgccgtttactggggcttcaattcaaaccttcgcttacgctaagctctcctcttaaccttccagcaccgggcaggtgtcagcctctatacgtcatcttacgattttgcagagacctgtgtttttgataaacagttgtttgggcctattcactgcggctaaccaatctcttggctagcaccccttcttccgaagttacggggtcattttgccgagttccttaacgagagttctctcgctcaccttagtgttctccactcgactacctgtgtcggtttgcggtacgggtatgtcatctctggctagaagcttttcttggcagtgtgattaccacaccttcgctacttttaattcactcctcttcacaactcgtgttgctggttagaagcatttgactcttaaccgcacttgttgcttgaacatcgttccatcgcgatgcgtgcttcacctcctgcgtccctccttcgctcttaacgatttgacacagtacaggaatctctacctgttatccatcgactacgcctctcggccttgccttaggtcccgacttaccctgggcggacgagcctgccccaggaaaccttagtctttcggcggataggattctcacctatctttcgctactcataccggcattctcacttctaagcgctccattgatcctctcgattcaacttctccgctcttagaacgctctcctaccacgtgctctttaaaacacatccacagtttcggtactatgcttagccccggtaaattttcggcgcagcgccactcgactagtgagctattacgcactctttgaatgatggctgcttctgagccaacgtcctagttgtctacgcaactccacatccttttccacttagcatagatttggggaccttaactggtgatctgggctgtttccctttcgactacggatcttatcactcgcagtctgactcccgtgtatggatatctggaattcgtagtttatctggattcagtaacccctgacgggcccctagtccaaacagagctctacctccattatcctctccacgaggctagccctaaagctatttcggagagaaccagctatctccaagttcgtttggaatttcaccgctacccacaactcatccccgcaatttttaacttacgtgggttcggccctccagtgcgttttaccacaccttcagcctggtcatgggtaggtcacttggtttcgggtctacgtcacctaacttttcgccctattaagactcgctttcgctccggctccgtcttttctgacttaacctcgctagataacgtaactcgccggttcattctacaaaaggcacgccattgcactttaatgtgctttgactacttgtagacacacggtttcaggttctttttcactccccttccggggttcttttcacctttccctcacggtactggttcactatcggtcactaactagtatttagccttgcgagatggtcctcgcggtttcaaccgggattcctcgtgtcccggcctactcaggattctgctaggcgtgcttgagatttcgcttacggggctctcaccctctctggcttaccttcccagataattcaactatctcttacactgccacgtcgcagtcctacaaccccaaatgataaatcacttggtttgggctctttcctcttcgctcgccgctactaaggaaatcgatctttctttctcttcctgcagctacttagatgtttcagttcactgcgtcttcctttgattagctatctattcactaatcaataatgcatctctgcattgggttcccccattcggatatctccggatcactgcgtacttaccgctccccgaagcttttcgtagttcgtcacgtccttcttcggctgttagtgcctaggcattcaccgtgcgcccttttctacttgaccttactcaagaattctcttctcggtcgctctacaatctgttctctttgattgtctcggttttttgcttggattatattcagttttcaatgtactagctctttttgaggtactaccctcaaaactaaacaaagtttctcagtgtgcttccgcttgctctggatacttctcttagcattcctgctctccatatccttcgcttccttagaaaggaggtgatccagccgcaggttctcctacggctaccttgttacgacttcaccccagtcatctgccctgccttagacggctccttcccgaaggttaggccaccggctttgggcattgcagactcccatggtgtgacgggcggtgtgtacaaggcccgggaacgtattcaccgcggcgtgctgatccgcgattactagcgattccagcttcgtgcagtcgagttgcagactgcagtccgaactgagaacagctttcagagattcgcttgccttcgcaggctcgcttctcgttgtactgcccattgtagcacgtgtgtagcccaggtcataaggggcatgatgacttgacgtcatccccaccttcctccggtttgtcaccggcagtctcattagagtgcccaacttaatgctggcaactaataacaagggttgcgctcgttgcgggacttaacccaacatctcacgacacgagctgacgacagccatgcaccacctgtcttagcgtccccgaagggaactttgtatctctacaaatggcactagatgtcaagacctggtaaggttcttcgcgttgcttcgaattaaaccacatgctccaccgcttgtgcgggcccccgtcaattcctttgagtttcaaccttgcggtcgtactccccaggcggagtgcttaatgcgttagctgcagcactgagaggcggaaacctcccaacacttagcactcatcgtttacggcatggactaccagggtatctaatcctgttcgctacccatgctttcgagcctcagcgtcagttgcagaccagagagccgccttcgccactggtgttcttccatatatctacgcattccaccgctacacatggagttccgctctcctcttctgcactcaagaaaaacagtttccgatgcagttcctcggttaagccgagggctttcacatcagacttattcttccgcctgcgctcgctttacgcccaataaatccggacaacgcttgccacctacgtattaccgcggctgctggcacgtagttagccgtgactttctggttgattaccgtcaaataaaggccagttactacctctatccttcttcaccaacaacagagctttacgatccgaaaaccttcttcactcacgcggcgttgctccatcagacttgcgtccattgtggaagattccctactgctgcctcccgtaggagtttgggccgtgtctcagtcccaatgtggccgatcagtctctcaactcggctatgcatcatcgccttggtaagcctttaccttaccaactagctaatgcaccgcggggccatcccatagcgacagcttacgccgccttttaaaagctgatcatgcgatctgctttcttatccggtattagcacctgtttccaagtggtatcccagactatggggcaggttccccacgtgttactcacccatccgccgctcgctttcctaacgtcattaccgaagtaaatctgttagttccgctcgctcgacttgcatgtattaggcacgccgccagcgttcgtcctgagccaggatcaaactctcattttaaaaagtttgaatgattgctcattccttatttaagatctttgtctcaaatttattgcttgcgaattgacttcgcttcttgtttgggtttttacacccgcacacttttagcgaaactttgttcagttttcaaagtactacctctgtcttgctttttttgcaaagcagacagcttttatattttatcaaaccatcatttctttgtcaagaacttttttgatttgttttttcgtcttactcaagctttttctgctttcacctgacgacatttaaatatattaccagcttatttacttctttgcaagtactttttttctttttatttgttttctttccttgcatgtctgtttttaagctctcgtcgcatctctcgaagcgactttattaatttaccttattttctccgctttggcaagtcttgctcttcgttcggatttttaatatgaatatttcaatatcaaacgtatcttaatactattattcgcctctataataattaaaaaaatatttagcttgattttctctgcattcttcaaattgttcgaacattactttgtgaaaataaaaaaaactttttaaaatttttcaacaaaaaaagtctgagattcttctcagactcatcttagacaccatacttgcgtcgaatatcgcgcttctggtctctttctttaattgtttgccgtttgtcatattcctttttaccttggccaacaccaatcaataccttggcaaagccatgttttaaatacactttaagtggaataattgcaataccacgctctgattgtgctttggccaaacgtgcaatttcttttttatgcaaaagaaggcgccgactacgtagtggctcatgattgtaccgattgccttgcttatattcactaatatgaacattttctagccaggcttgtccgttgacgatctgcacataaccatcccgcaagttgattcttctagctcgtacagacttaatttcggttccagttaaagcaattcctgcttccaatgtttccttaataaaatagtcgtgtcgtgcttttttattttgtgcaattaaattatcttctttttcttttttcattaagatcaatccctaatgtttaaaatttctccgacctccacggtttccacgacgacgattattcattccgcgatcgttatgcttatgcttaggcgcattaggatcatatatttcaaagtctaactgatgttgttcaacgttagcattaatcaaggttaccttaattggcatccctaccttatattgcttatgagtacctcgaccagttagcgtcaatgctttttcattaaaactgtaaaaatcatcagtcaaattcgaaatatggattaatccctcaatcgtatttggtaattgaataaacatcccaaaactagttaccgaagatactaccgcgtcaaagtgttgccccacttgatcggccatatattctgtcatcttcaagtcatttacttcacgttcagtatcaattgaacgtctttcttgcgttgaagtttgttctgcaacatctggcaagtaactagcaaaatgcttttgcacttcttcattagtcccctggtcttgatatgcatggatcatccagtgcaccatcaagtcagaataacgtctaattggtgaagtaaagtgagtatagtattctgcagctaagccaaagtgtcccagtgcttcttctgaataatgcgcttgctttaagctacgtagcatcatcatttgtactacagcttcctctggagtatctgtagttttagaaactactttttgtaaatcaattggcttaacgttatttggatccgcatgaatattcaagccaaatgcgctacaaaattcaaagaaagtcttgattctttcggcatctggtgtttcgtgaacacggtacaagaatggaacatgctttttgaagaaatcttcggccacggtttcattagccattaacataaatgattcgatcatcttttcggcagtaccacgttcatgcaaaacaatatctgttggcttgccttgatcatcaacaataatttttgcttctggttcttcaaagtcaatagcaccacgttgatgacgttgtttatacaaagcagcatgcaaatctgccatttcttcaagcattggtcggagtttaacatacttatcctctaaaccattcatttcgcccttaagagttttgttaaccttgttgtaggtcattcgaccatgtgagcgcataacagaaggataaattttataacctactcttttaccttctggcgtaatttccatgtcacatgacaaaacaagccggtccacgccttcatttaaggaacaaattccattagaaagtctaaatggcagcattggaattacccgatcaactaagtaagtactgttgccacgagcaaatgcctcttcgttcaacggcgtattttctgtcacatagtgagaaacgtccgcaatgtgaacaccaaggtgataattgccgttaggctttttccataaaactacagcatcgtcaaagtccttagaatcatccccatcgatagtgactgcaggttggtcagtaatatctactctaccctttttttcctcttcagtaacatgatcaggaatagcattagcttgcgccattgcatcttcaggccattcagttcttacatcatgtgctgccacaattgacataatgtcaacgccagggtcatttttattaccaataatgttgactactgcaccagtcattgactcaggattttcctcatctggataatccttaattgagaccttaaccatatcgcccatttgagggatcaagccattttcagacaaataaacccggtatttatgcaactttttatcgttactcaaagcatagccgataaaatgactgttttttctttgttcatcagttagcggatgaaattcaccaactaacgtttccaaaccatgttcaaggatctcttcaacttgaccttctggtcccttaccattccaaggattaccaccagcagtgatctttacttttactcggtcaccattaacggcatacttggtataatctgcggcaacaaagacgtcgtccgcattttcatcatctaatctaacaaagccaaagcctttatcattagctctaaattcaccttcaacttcagtattttcttgagctaattggtattgtcctttgccatctgtaataatctttttatcgtgctctaaaaaagaaagagccttaattaattcagtaaaattacctaatctatcacgacgtgcttcacgttcaatttgatctacacgaaattgtttttgtggattatggcgaaaaatttctaaaacgccggccaaaattttttcgttttgtgccatgcagttattctccgatctttaaatttaataaaaaaagcctccccatcatattttgatcgggaggtacaaaatttattttgaagacatataagctaagataatagcaaagacgaaaaagagtaccaataaaactgaggttactttttccataaatgcttcaaaaccacgttttttggtttgcccactaaaaacggcaccgccagataaggcgttcaatgcatcttgttgtttttgtggctgcatcattgttgcaatgacaattaagattgaaacaatgattagtagcgtcataactaaattatacaatgcgctgcctccaatacacacatacgatttacttaccaagtttatcacaaattactagtttttgcagttatttttttagttcaggcgcatctgtcttgaaatctttttgcgtcgttttacgatgattttgataccacagtgaagttttgcttggatcatcaaacaaacgttttaaagatggcgccttgttatagtcgtaatccttcggcttgactctagtaaacccttttggtttatagaatcggagcagattgccattaattacacgatctgacaaagacagctgtgtagttacggtgttagaaattgcagttaatttttcttttaatttcttattaggtttgatcctttcgcccgtcttggtgtcataataatcgctacccaccttagaatattccggagtgataaagtcaccatttctttgtgctacaatttgcggtgcatttttgcttagcaagtcatagccaaattggatcgtatctttgtctttgatccccagcaagttcagtaaggttggtaaaacatcgatttcaccgccgtaggtgtgattaatgccaccctttagtcctttcatatggaacatcaaaggaactcgctggaactgcaaattatcaaagtcattaaacgaatctttcttaagcaattctgcactagccttatggtgattacctgaaatcccatagtgatcaccataaaatactactagtgtcttcttatctaggcccgtcttcttcatccaacgcataaattcaccaattgcttggtctaaataatgcgcggtctgcacataaccatcaactgtttcatccccagtattcgttttatcaatcgtctgattctttttatcgatattatacggatagtggttcgttacagtaatcatctttaaataaaatggttgtggtaaacgctcaatgtacttgattgactgatcaaagaaaattttatcttttaagccatatccgatatagtagcttggtttgttctgatagaaagacagtggcataaagtattggtagccaaatgacttataagcattatttctattccagaaggagccagcaccaccatgcattacagcagtagtataaccagcttgttgatgcaaaatggctggagcactttcaaaagtattagaagtaccatacgtagacattgcactacctgattgtagtccgtataaagaattttcaagcatcatttcggcatcagaagtcttgccttgtcctacttgattaaagaaattatcaaaactaatggtctctttttgatgataaatcttattcagatttggcgttacctctttacctttccatttgtagccaatcagaaattgttgaaaactttccaaatggatgattaacacattttttcctttagccacgccggtgtaagcgggattaggtttaacgtaattttcttttaaatagtttctaacagacttcaaatcagaaacattagctttggccatctgtgcactagtttgtgctgtcttatagccatcataaatagcgtattcattgattcccagatatttgacgatgtaattattatcaaaagttctcgtcaaaagtccagaacgatcattttgggccatcaataaattcagtcccattaagctgacagccaaagcctcaattaacaaattaacttttagcttcagtggacgaacatccatcttaattactttggtcgccaataacacgataattacagcaatatcagcaaaagctaaaaaatcgctagctagtgtaattcctgcaatacttttacccaaattatcggaagtcgagcctgatgtcttaataattgaaaatgacaaaaagtttgaaaattcgcgataatataaaatattggcaaataaccacagtgttagcaaaaaatcgataactaaaataatccaataggatttacgtcctttaaaaaatagcccaattcccagcaaaagcatccctgaaggaatcggattaatcagcaataaaaattgctgcattggaccaactgctcctaaattaaacttagttaaatagataaaataagttttaagccaaaacaagactaaaacaatcgtaaaaaagcctaacttagtctgtgtcagccacctaaaaaaagatttagtgtgttccacgcgcttctgctcctctcattacggtaatttatcttactacgaaatttagtaagacaccgttgttttaataaaaattaatcatttttgtgctttttatctttttcggcttaaaaatccagcctaagatgccgagaagcataccgaaaaaatatgttgaaaagcgccaaataaacatagccaaaattaacgcaccatgtgaagaaatgaaggtggagaataacgtttggaaactatattctgcccctcctgacgcacctggaataggaatgatcgccataaacatgataatcattatattcatttgcgtaacttgataccaagaacaaggtacatttagcgctgttaataccataaatggaacggagtaaaagaaaagtagctgcaatactgttaaaagcgaggcaacaaataatttcttcttttctttttttagtttctgactctctgcataaaaagtatcaatcttttctaaagtagccttacgccacttctcaactcgttcctttttcatcatttttgccaacaagtccattaaccaattagttgcctttttagtaaaacgataagcaaacataattgcaagcaaaaagataattgaactaacatgaatcaaaaagccaattgcaataaaaattgctaaaccagcgaacttagtcattaccatatgaaagccaaaaataattgtaaatacataggcaaacaaaacaacgatctgataaataataaatttcatcagcaaaattgaggtggaacggccaccttccatgcccatttgaatcattgcggctagctgtgatggttgtccacccgtggacattggtgtaattgcattaaatagagcttgaataattggaattcgcaaaaacgaccaagctgaccttttaggctctttctttcgatgagctaaagtagctaagataccggcttcacatacataggacaaaagcattaaagcaaaaaccatgattaatccaaaaatattcaggccatgagctgcccgtaatatttccgatatcggtgtagcttttaaatctgcatatagcacaaaggcactgattgctaaaacaaccagaatgccccacaaatgttttttattcattaatgtatttgacctagctcttttcctaattcatattgctcatgataaaattcgtcccaaattttagctaaatgatcttctgaatactgttgacttgccttacgcgataattcgctgtatttctgcaaagtttgtggattggcaactactttttgcaatacttgattcatttcgccaaaatcttttccgcttagataatagccatcgataattgccttataaagatcaaggtcacgcaataatactggtgttccacaactgaatgcttccaaaactgacattgggaacaattcatcatatgatggaagaacaaataagtctgcaatatttaaatacttaactaacttctctcgctctacaattcccgcaaacgtcatattcttaggtggattgtcaaccatttctttgtaatgatcatagccatcagtaattttgccaaacgaaaaaccgcctgcccagataaattgaatatcaggattagcttgtgccatcttaacaaagtcatcgatccccttgcgttcctgtacttgaccatcaccaaaaacaacaaatttatcaagtggaattcctaattcatgacgaaatgcgtttttgctggccaatgattcttcataaaattctgtttttgaaacaaaattaggaatatatctaaccttgttccgatcaattccatagttaaccaacttatcaataaagattggattaactacaacaatttgatccatgcgtttataaaaatcaattacatattgataaaaaacttttttagctacgcctggcaacttaattgagccttctaatgtatctggtaaaaagtgaacatagccaatcttcctgccacgtgctggtaaaaaactatttgcgtaataggttggattaatcgtgtgataatgcgttaaatcgctattgccatatttgttaatcgttacataaaattcgtctactaagtgcgtcctcagaagtttaatcaattcattataagctgaacctacaccctgtcctttaacagaatcagcttgcgagaacatattaattctaatcatttagttcctctttttagtctcctcatcatgcttaggttgatagtgatcaattgcatactgataaaaatcagacacatttttagcaaattgatcagctgaaatcttctgtaatttattttgcaaaagttcctgcgggattcttttcgtcccttgcttaagcaaagtaataatctcttctaacatttcttgttgtgtagtaaatgtctgcccaaaaatatcttgatcaaaaatgttttcggtatagtctgtgtcataaaccacacatggcgtacctgcagctagagcctcaatataagtcaacccctgtgtttctgtatcactagctgaaacaaaaagatcagccattcgataataattaccaacatcgccatgctctacattaccgacaaaaataacgtaattctctagtgttaatcgctctacctgatcctttaacacatcaacatcagggccatcacctgcgataacaaatttcacattaggaaattcatcaataatttcaggcattacgttcaaaatatgattaatctttttttcggctgcaattctacttaaggttaaaattacaggcgcatcttgatcaattccaagttcttgccgcacatcacgttgaatatcgttgttcatgccctgcaaatctactccagtaggaatcaccctaattggtatttgaacgccatagcgccgtaataattcttcaactcggccactaggagcaatacatccatccatatttttcaaatagcttttaacaaattgtctaacatgatatggacgaagcaaatgcccatttaaaatatagtgcaagtaatcttcatacatcgtatggtaagtgtggatagcaggaatatctaattgatgagctacatatttgccaatagtacctaatgcaaattcagtttgagtatgaactatatcaagattgacttctttagctactttggttgcttcaaatagtcctctaaatgctattcgccgatcggtaaatgagacaaaaggaatactgctaaaacgaaatacattcggttctacagttccttttttcacgttcggatcagtagtagtaaaaataaatacattatgcccctgcttttccaacgcttcttttaacgttttaattgaagtagctacgccacttatctggggaaaatatgtatcggtataaagaccaatattcatttgagtacctccatatgtagcattataaagattcctgtattcatgtgcaatttatataataaaatgctaacattttaaaataaaaaaaaagcgatccaataattggatcgcttcataataatagcggtgatcggggtcgaaccgatacgtccgtaatggacaccagattttgagtctgacgcgtctgccaattccgccacaccgccataatattaaattttaaaataatcaacttattcggttgataaggcggaggtcggatttgaaccgacgattaaggttttgcagacctctgccttaccacttggctacaccgccataagttatgaaattatttagaattgggatagctggattcgaaccagcgcatgttagagtcaaagtctaatgccttaccacttggctatatcccaatactagggcggaatgtgggaatcgaacccacgcatgctggatccacaaaccagtgtgttaaccccttcaccaattccgccatgaaggtaaacagggatagtaggaattgaacccacactagcggttttggagaccgatgtactacctttatacgatatccctattatggaggagggtggattcgaaccgccgaactcagagagagcggttttacagaccgccgcgtttagccacttcgctactcctccagatgatggcgcgggacggaatcgaaccgccgacacaaggagcttcaatcctttgctctaccaactgagctaccgagccatcttacggtccatatgggatttgaacccatgatctcctccgtgacagggaggcgagataaaccactgctccaatggaccaaattgcgggagctggatttgaaccaacgaccttcgggttatgagcccgacgagctaccagactgctccatcccgcgatattcaactaaggaggatgtgggatttgaacccacgcgcggcagaaccgcctaacggttttcaaaaccgtccccttaagccacttgggtaatcctccattgcttaatgccaaaaaaataaattgtggcaatgacccgtacgggatttgaacccatgttacggccgtgaaagggccgtgtcttaaccacttgaccaacgggtcatgtaactcactcaagagcactttattataataactaatcacatttcaaaagtcaagaactttttatttatttttttaattagctattactattgtgatctctcaatcacaacgtatttaatattaatagatattcagtcaaaatgcaagtacttttttatttttttgttgtaaaacatttatatctatcttaatacttcaaattagctagagcaaaacagcttctcttatctttaactaaatgatctttataaattgttccatattaaactgcttctttatatcactatgaaatcccccacaaaattatttttttaatatagatcatacaagaagaaatttaaaacaatcggctctccctatgttatatacacgattattgacttgaatcaatgtccaagacttttacctaaaagaagtgtaataatttccattaagtcattcaaaataatatgcatttaggtttatcaataactcaaaattaaggttttaacatcttatgacgtgttttcaatgcagagagaacttaacgaactcatctccttccatccactatacatatggttgcatataagacgatacatttgtaattccttactgtttcagcaggtatttactcctttgtaaacgtcccatactcataatatcattgctactggctcttagttctaacactttcatcggactaagaatgccgctcggtacacaaaaaaactgctctagaaattaatctagaacagttacttttctatatagcggagacagagagattcgaaccctcgcaccggaataacccgatctacacccttagcaggggcgcctcttcagccacttgagtatgtctccaatgggcctaaatggacttgaaccatcgacctcacgcttatcaggcgtgcgctctaaaccagctgagctataggcccatataaagcgggtaacgagaatcggactcgcgactaaagcttggaaggctttcgttttaccactaaactatacccgcacctaatataaaatgaaatggcgcgggacggaatcgaaccgccgacacaaggagcttcaatcctttgctctaccgactgagctaccgagccatcttacggtccatatgggatttgaacccatgatctcctccgtgacagggaggcgagataaaccactgctccaatggaccaaattgcgggagctggatttgaaccaacgaccttcgggttatgagcccgacgagctaccagactgctccatcccgcgatattaatataaaagccatattatggaccttgtaggactcgaacctacgacaggacggttatgagccgtctgctctaaccaactgagctaaaggtccaagcttacaattatagcggcgggggggatcgaaccctcgacctcccgggtatgaaccggacgctctagccagctgagctacaccgccaaaatgtaaccaatcaccattagattacaatcgggaaaacaggattcgaacctgcgaccccctggtcccaaaccaggtgctctaccaaactgagccatttcccgttatatgcgccctgaaggatttgaaccttcaaccttctgattcgtagtcagacactctatccagttgcgctaagggcgcatcatcaatgccggggatcggagtcgaaccgatacggttgaaaccaaccgcgggattttaagtcccgtgcgtctaccaattccgccactccggcgtgttgatgaaagcggaagacgggattcgaacccgcgacccccaccatggcaaggtgatgttctaccactgaactacttccgcgtaatataaatgccgattatacgacttgaacgtacgaccccctgtttacaagacagatgctctaccaactgagctaaatcggcatattgtcaatatgtggttggcaatacgggtggtgggacttgaacccacacgtccgaaaacactagaacctaaatctagcgcgtctgccaattccgccacacccgcatatatagggtcatgagccgtgagggacttgaaccctcgacccacggattaaaagtccgttgctctaccaactgagctaacgactcgatatggaggatacagggctcgaacctgtgacctcctgcttgtaaggcagatgctctcccagctgagctaatcctccatattgagcacggcagcttcctttcctcgcaggcagttgcccaccaactactttcggcgttaagaagcttaacttctgtgttcggcatgggaacaggtgtatccttcttgctttcgccaccgtactcttttgagcttttacactcaaaactaaacataatccttctcgcaaaaaaccttccagtttgcttcgctttggtcaagtcctcgactgattagtactggtccgctccatccttcacaggacttccactcccagcctatctacctcatcgtctctgaggtgtcttactgcttacgcaaaggaaatctcatcttgaggggggcttcgcacttagatgctttcagcgcttatcccttccgcacatagctacccagcgatgctcctggcggaacaactggtacaccagcggtgcgtccatcccggtcctctcgtactaaggacagctcctctcaaatttcctacgcccacgacggatagggaccgaactgtctcacgacgttctgaacccagctcgcgtgccgctttaatgggcgaacagcccaacccttgggaccgacttcagccccaggatgcgacgagccgacatcgaggtgccaaacctccccgtcgatgtgaactcttgggggagataagcctgttatccccagggtagcttttatccgttgagtgatggcccttccatacggtaccaccagatcactaagtcctagtttcctacctgctcgagttgtctctctcgcagtcaagctcccttatacctttacactctgcgaatgatttccaaccattctgagggaacctttgagcgcctccgttacactttaggaggcgaccgccccagtcaaactgcccacctgacactgtccctggcctggcttacaggtcgaggttagagcatccttcaaacaagggtagtatcccaacattgcctccaataagactagcgtcctatcttctctggctcctacctatcctgtacatgtttaaaagatactcaatatcaagctacagtgaagctccatggggtctttccgtcctgtcgcgggtaacccgcatcttcacgggtattataatttcaccgagtctctcgttgagacagtgcccaaatcattacacctttcgtgcaggtcggaacttacccgacaaggaatttcgctaccttaggaccgttatagttacggccgccgtttactggggcttcaattcaaaccttcgcttacgctaagctctcctcttaaccttccagcaccgggcaggtgtcagcctctatacgtcatcttacgattttgcagagacctgtgtttttgataaacagttgtttgggcctattcactgcggctaaccaatctcttggctagcaccccttcttccgaagttacggggtcattttgccgagttccttaacgagagttctctcgctcaccttagtgttctccactcgactacctgtgtcggtttgcggtacgggtatgtcatctctggctagaagcttttcttggcagtgtgattaccacaccttcgctacttttaattcactcctcttcacaactcgtgttgctggttagaagcatttgactcttaaccgcacttgttgcttgaacatcgttccatcgcgatgcgtgcttcacctcctgcgtccctccttcgctcttaacgatttgacacagtacaggaatctctacctgttatccatcgactacgcctctcggccttgccttaggtcccgacttaccctgggcggacgagcctgccccaggaaaccttagtctttcggcggataggattctcacctatctttcgctactcataccggcattctcacttctaagcgctccattgatcctctcgattcaacttctccgctcttagaacgctctcctaccacgtgctctttaaaacacatccacagtttcggtactatgcttagccccggtaaattttcggcgcagcgccactcgactagtgagctattacgcactctttgaatgatggctgcttctgagccaacgtcctagttgtctacgcaactccacatccttttccacttagcatagatttggggaccttaactggtgatctgggctgtttccctttcgactacggatcttatcactcgcagtctgactcccgtgtatggatatctggaattcgtagtttatctggattcagtaacccctgacgggcccctagtccaaacagagctctacctccattatcctctccacgaggctagccctaaagctatttcggagagaaccagctatctccaagttcgtttggaatttcaccgctacccacaactcatccccgcaatttttaacttacgtgggttcggccctccagtgcgttttaccacaccttcagcctggtcatgggtaggtcacttggtttcgggtctacgtcacctaacttttcgccctattaagactcgctttcgctccggctccgtcttttctgacttaacctcgctagataacgtaactcgccggttcattctacaaaaggcacgccattgcactttaatgtgctttgactacttgtagacacacggtttcaggttctttttcactccccttccggggttcttttcacctttccctcacggtactggttcactatcggtcactaactagtatttagccttgcgagatggtcctcgcggtttcaaccgggattcctcgtgtcccggcctactcaggattctgctaggcgtgcttgagatttcgcttacggggctctcaccctctctggcttaccttcccagataattcaactatctcttacactgccacgtcgcagtcctacaaccccaaatgataaatcacttggtttgggctctttcctcttcgctcgccgctactaaggaaatcgatctttctttctcttcctgcagctacttagatgtttcagttcactgcgtcttcctttgattagctatctattcactaatcaataatgcatctctgcattgggttcccccattcggatatctccggatcactgcgtacttaccgctccccgaagcttttcgtagttcgtcacgtccttcttcggctgttagtgcctaggcattcaccgtgcgcccttttctacttgaccttactcaagaattctcttctcggtcgctctacaatctgttctctttgattgtctcggttttttgcttggattatattcagttttcaatgtactagctctttgatcctttttctggatcaatggaggctaacgggttcgaaccgatgacctcctgcgtgcaaagcaggtgctctcccaactgagctaagcccccagagtattttattttcggccagacataactttaactctttttcttcgttatgtcaatgggcctaaatggacttgaaccatcgacctcacgcttatcaggcgtgcgctctaaaccagctgagctataggcccgactaacgcttggcgtttttcaaatctttgaggtactaccctcaaaactaaacaaagtttctcagtgtgcttccgcttgctctggatacttctcttagcattcctgctctccatatccttcgcttccttagaaaggaggtgatccagccgcaggttctcctacggctaccttgttacgacttcaccccagtcatctgccctgccttagacggctccttcccgaaggttaggccaccggctttgggcattgcagactcccatggtgtgacgggcggtgtgtacaaggcccgggaacgtattcaccgcggcgtgctgatccgcgattactagcgattccagcttcgtgcagtcgagttgcagactgcagtccgaactgagaacagctttcagagattcgcttgccttcgcaggctcgcttctcgttgtactgcccattgtagcacgtgtgtagcccaggtcataaggggcatgatgacttgacgtcatccccaccttcctccggtttgtcaccggcagtctcattagagtgcccaacttaatgctggcaactaataacaagggttgcgctcgttgcgggacttaacccaacatctcacgacacgagctgacgacagccatgcaccacctgtcttagcgtccccgaagggaactttgtatctctacaaatggcactagatgtcaagacctggtaaggttcttcgcgttgcttcgaattaaaccacatgctccaccgcttgtgcgggcccccgtcaattcctttgagtttcaaccttgcggtcgtactccccaggcggagtgcttaatgcgttagctgcagcactgagaggcggaaacctcccaacacttagcactcatcgtttacggcatggactaccagggtatctaatcctgttcgctacccatgctttcgagcctcagcgtcagttgcagaccagagagccgccttcgccactggtgttcttccatatatctacgcattccaccgctacacatggagttccactctcctcttctgcactcaagaaaaacagtttccgatgcagttcctcggttaagccgagggctttcacatcagacttattcttccgcctgcgctcgctttacgcccaataaatccggacaacgcttgccacctacgtattaccgcggctgctggcacgtagttagccgtgactttctggttgattaccgtcaaataaaggccagttactacctctatccttcttcaccaacaacagagctttacgatccgaaaaccttcttcactcacgcggcgttgctccatcagacttgcgtccattgtggaagattccctactgctgcctcccgtaggagtttgggccgtgtctcagtcccaatgtggccgatcagtctctcaactcggctatgcatcatcgccttggtaagcctttaccttaccaactagctaatgcaccgcggggccatcccatagcgacagcttacgccgccttttaaaagctgatcatgcgatctgctttcttatccggtattagcacctgtttccaagtggtatcccagactatggggcaggttccccacgtgttactcacccatccgccgctcgctttcctaacgtcattaccgaagtaaatctgttagttccgctcgctcgacttgcatgtattaggcacgccgccagcgttcgtcctgagccaggatcaaactctcattttaaaaagtttgaatgattgctcattccttatttaagatctttgtctcaaatttattgcttgcgaattgacttcgcttcttgtttgggtttttacacccgcacacttttagcgaaactttgttcagttttcaaagtactacctctgtcttgctttttttgcaaagcagacagcttttatattttatcaaaccatcatttctttgtcaagaacttttttgatttgttttttgtcttgctcaagctttttctgctttcacctgacgacatttaaatatattaccagcttatttacttctttgcaagtacttttttctttttatttgttttctttccttgcatgtctgtttttaagctctcgtcgcatctctcgaagcgactttattaatatataatacttgaatattaattgcaagtattttttcaataaagaattatgctcgctcttaaaaaggcgacttcaataatataccttaaaattcattttttgacaagcttatttttaaatgaatatttacaaaattcatgttaaagttgatacatcactactttgaggaggtcattaaaattaaaaaatttgatttaactattatcggtggcggacctgttggcctatttgccgcgcgatttgcccatcttcatggactcaagaccgtactgtttgattcattatctgaaacaggcggacagccacaaatgctttatccttttaagaaaatcaaagatattcctgcttacgactctattacaggaactgaactaatcgacaatttacgacataatttaacggatacaactatttttactaaccataaagttgaaaatgtcactaaacaaaaagacggctttattatcgatgatatagttgcatcccgcagcatattgattaccactggtgccggtgcctttaaacctaaagctttaccattatctatggatgatgatactcaaaaaaggattcattactttattaaagatcccccaaaatttgtcggacaaacagttggcgtctttggtggcggcgattcagcattagacctggcactagaattagctaattatgccaatgtcaaaatcattcatcgccgtaatcaatttcgcggtcttgaatctaatgtcaaaaaacttaagtctttaaaaaatgttgaaattttaactccttatcttcctaaacaaatcaatttggttgataatcaactgaacgttaatttaaaagaaatgggaaaagatagcttaactaatatcaagttagaccaagcagtcgttgcatatggctttaaagctaataatcgctttgtcaaaaaatggggaatcgatttagctggcgcacaaattaaggtgaattcaacaatgcaaactaatatcgccggtgtttatgcagctggcgatgttgttacctatcttggacgcgtccctttaatcgctctcggttttggcgaagcccagattgcaatcaccgcgattatgcgtgatcttttccctgaaaaaactttgacaattcattcaactagtttttaggagttccagatgagtttaatcgattttattttgcacattgatgaccatttaatcccgattgttaaccaattcggtggttggtcctatttaatcttattcgctatcatttttattgaaacaggcttagtcgtttttccatttcttccaggcgattcgttgatttttgctgcgagtgcaatggctgctaatcctaagtatggcttaaatatttggctagtttatcttatagtagcattcgccgccataatcggtgacagtatcaactatgaaattggtgcctggtcaaccagagctggtgaaaaacatagctggttcaataaattaattaatcaaaataatcggttggccgctgaaaagttctttgagcgccacggaccaattacgatcgttataggtagatttataccatttattcgtacttttgtcccattcatttccggcggcagtaagatgcattatggtaaatttatcacctacaacatcttgggtggcttgctttggacaggattgttcacaatcatcggtttcttctttggcaatattccatttgtaaaggaccatttttcaatgatcgtaattgctatcattttagtatcagttgtgccaatcgcaattgtcgcaatcaagaaaaaaatatcactcaaaaaagagttccactaaggaactcttttttacttacgtaataatttttcagcaaaatataattcataaataaccccagcaacggcaaaacaagaagcaaagaagccttccgttagcacattgataattgggtcagtattaggatcaaacagccaatcactattgttaaacaaaatatggtgaaaaatcacaaagaaactgtcgaaattggttactgcaaatggaaaaataataattggcaataatagcaaaataagggctactgatttatccaaattaagcagtagctttttcttttgtcgtttaaaaacaaagtgcactatgatgcagataataaaaactaatagagtcagaataaataaatgcttacattccgcaaaatgttctgccgcattagcagatgtagggaaattatccattttaagctgctttttaaagggccagagcaaataaaacatcagctggttataattatgcattaccttaaacaaagacatgtgaaccgtctcatatgtcttttgtacgatcataaaaataaacaataatggccaactagccacaattgccccaattacactgctagaaacagcaaacaaaaaatgataaatcagcgaaaaaatattgtttttagtaatcataattcaaattcatctaggttattaactaaaattgttggttgacgtttatctgcaatatccactttggtcgtcacacctgtcaaagtcaacaactgatctactccactattaaagccagctttaatatcggtatcgtaattatcacctaccaaaagtgcctcatctttgctatagccaactttatccaaagccatttttacaataattgattcaggcttaccaatatacagtggctctactccacttgctgcagcaacgaatgcacattgtgaaccattgcctggaattagctcatcctctgctggtaaattcatatcggcattagtcccaataaaagtggctccacgtctaatcgcccgtgaagctactcgtactttatgataagtcagatctgtatccataccgacaattacataatcgggattttcttcattaagctcaaactctggatgttgcaataattcatgccagagaccaatctgcccaataatatacaagccgatcttttccttgtgttctctttgtaaaatatagctagctgtggccatacttggcgtataaacatggtccgtatcagtttcgataccgtgtccctttagtttatcaactaccatttgcggtgttctggtcgtattgttggttaaaaacaaatagtctttccctgcttgaaccaaacgatgaacaaatcttactcctgattcaactgtttccttaccacgataaacagttccgtctaagtcaattaaaaatacccggtaatctttcactagtttccctttctctttttaataataaatgaatgatgccgtccaaattcttttttcactgcaattgattgtttttttcttaaatttagtttgatgaacacgccgcttcttaaacggattattttcatttttattcttccgataatttcgacgtcgtgcatgataacgctcatttttaccaaaatcgcgctcgcgtcgttcacgtgatcgccgtattttagtacgttgatgctgataataatgtactggatgcgttaattccaagataaaataaggtccgccgggattacaatattccgttaaataatccacgatcgccatttcttttttatcaattgcggttctagcaccgtctttataaaagcctttcaagcgtaaatgttcactagaaacgtcccccaccagataatcatactggtcaagataaggatcatattttttacgcaaagattctaaatcaagtgcgtctcgctcattgacaatgatgctataaagctgcgcaccaatcttaatgctcttaccatcttgcaccacgtcagcaagtgggtgtctaattggctgttcttgttcaaatttattttcttcagtcatctttttcacttctcgctgttaaaggatatttttcagccaaatatttaccaacaacttcacgtaaaaattgtgggaataaaaactcattttcaccgacaatagccaaagttggaaaaaatggaactaagacataatgatccaaacaggcaattttatattctttttgtggatcaatttcatgcccattgacgtaaactacacgtctacgcatatcaaccttgatccctttgtaatacatctgaccaaaaatttttcctcgaaaactcatcccttgcagtggaaaatggtctaggtaatgccgattcttttcaatttccatcactagtcgccacaaatcataacctttcaaggttgaacgaacaacgtgcattggatgcggtaaggcattttgtaaatcatattgagtaattattccactcttaaacgggggcaagaataggcctgagcttaaaatggctaaatctgttttagcaaaatcagcaatcgcatcaagagaaacttgaacggctgctactttatcatccgcaaatttttcaggtaaattagccacttttcgttctgataaaagtcgcttaccttcatcatagtagccctgaatcactgccttatcttccggttcttctggcatcgaagcagtagaaatagtgcgaggtactaccttaatcacgtgatgatcttcaagttctagatgaatatcacccacatagtttccccatttacctgtttgcgtaatccaagtatgccccactttttcaccatgttcaatcagatcatggctgtggcctcctacaattaaattaatttgaggataatgtttagctaaccagcgatccatttttaatccaacatgagtcaataaaattaagacatcatactttccttcaatttgagctaattcgtgatccatactgtcacctaacatcttgacatgccaatgattaggaccataagtcattggataagctgcagtcaggccaattaaagcaattcgcgtctttttcttagtagttaaaaacatatggccgactgcccatttaggcattgattcatcttcttcacgcaaatttgctaaaactgtcggaaagtccgcatgatcaaataaatgttccaatacccaatgtggattagaaattccctcattattgccaatcgtaattgcatcatagttaaacccattcatcaatttgatgttggcttgaccttccgtagcatcagttaaaggatgagaccgatccataaagtctcctgcatcaaaagtgtagataccatcaaccgattgatcagcctgcgcttttttcaagtaacgtccgattttagggaaatgttcaaaatgtgaatgaagatcattggtatgtaaaattcgcagttgttccattttttatgccactttctaaccaattcgattggcttttaagatcatattatatgcgtctaaaatttttcccttaggtttatcccattctacccattttggatttttccaatcactttcattagtcaaagtctgcaagtcataagtatcattgatatatttttcataagcaatcagtgccttagttcgaggaatattcagctgcagtattttgacttttttaattaagccatgatctgcagctaattctgcaattccattttggtcaatattagagatttcataatatcgactgccatcatttctggtaacttcttcaattaagtccaattgttccattaaatctcatcctttagatttcaatcataccgattactgataaaagaatagtactataaatagaaaaaaatgtgtaaccatgctattgttaagtatgcgatagaggtgtacacatgaaatttaaaagccgactcgtttgggttcttttttttagcttagtctttttcataaatagtggttttacagttgtagggcaccgtggtgatcccatcaaatatcctgaagaaacaattcaggctgacgattccgcctttaattctggtgctgattacgttgaactcgatctccagctctcaaaggatggagttccggtcattgcacatgatgatgacctcttccgagttactcatacacatgcaattgtatcacaaaataattttacagcacttaaacaactgcaatatgacaatggcgaacacgttatgtcactcagtgagctttttaagcattatcaaaataaaccaaacactaaatttgtcttagagactaaaattgatcatggattaaatccgtcctatgagttagaggataaaatcgcacaaatagttaaaaaataccatatgcagaaaagaatcatgattcattcattttccgctgctagtctctttcactttagaaaaattatgcctgaagcttatctaattttgatcgttggtagcctgaaacgcattaatttcagtaatttacctcaagttaatgctatcaatgcttcttctgacattgtgcaagagcatccctttttaattcactggcttcacaaattacataagcaactgtttgtctgggccgaaatggacgaatcgcctgccctatggcattggctaattaatcggaatgttgatggcgtggttaccaactatcccgctactggttttaaatataaattagccaaaagtggcactaaaaagtacgctattaatagaactggaatttattttggtaaaactaaagccgctacaatgatgaatccgtatgttcgcatcaaagaaaagaagtacgtgcaaccaggtcaaaaagtcaatgtcacttatggcgtccgtgtagatgatcgcttattttatcaaattgctgaaaaaacttttatttcggcagaattcgttaattttgacttaacaaagcgagatattgctccttatcaaaataagaaaattatcgctaaacctaaccaaaaagttacaatttatcgttatcctgataaccaagccaaaacgcagcaaaaattacccgcaaatcaattattaaaaattcaaaattttaatggtagtcctaaaaacatgtggatttataccaaactaggttgggttaaggcaaaagatatcttgttctatggcttctttagtcaagacgatttcagagattatcagtccttaccacgggtcagtcagtacactaatctcgtgcttttgccctataatcctaatcaagcaattgcaccaaccacttttacacaaaagcttcaacagattaacaaaattatctactaaaacaaaaagaccagtaaactggtcttttttgcttcacttaattattgatttaaagtactttgctttttaactaattcatatggcaaaacaatatgagtatcatctacttcttcattgttcatcaacttagtcaacattctcattgctacggcacccatatcataaagtggctgcttaatcgtagtcaaagctggacgaacaacagaagctaactgcgtagcactggcggtcacgatttccaaatcttctggcactttcttacctgcatccatcgcagaattcaaaataccaactgatgaaatatcgcgagtaacaattacaccatcaacgccatctttaactaattgtgggtataaattataaccatctgaatagtctttaatatcagtatagattcgaggagtgcccaaatcattttcttccatgaattcttcataagcagggattctgttttcgctgttaactacagcatcttgatcaccaactacgattcccaaatgcttcttaccatcatggtacatcaaatttaatgcttcagtatcagccttcttatagtcaattgtgacagaagcaaaatcatcacgattgtctttagtacctgctaaaaccacaggagtatcagtccgcttaaaggcatcagctgctgcatctgataaacggttagacatataaattacaccgtcaacttgcttattcagcaaactttgaataacttggtcttccttcatcaagcggttttcaatactagtaataatgatgttgtatttatataaaagtgcaatatcatcaatacccttagataattctgcaaagtataaattagttaaatctgggacaattaaccctactgtagtagtccgcttagaagctaaaccttgagctacagcgtttggttgatagtgcagtcttttaataacttcgagaacacggtcacgtgtctcttttctaacattactattaccattcacaacacgagaaaccgtagccattgaaaccttagcttcccgagcgacgtcatagattgtaacttcttgtttatgcatctcttatctctcagtccttccaaaaaatccttcacttaaagatatcacgatgctgcataaaatgcaaacgtttacagcttttctttcattttttcattaagagatcatgatatactacagtaaacataatttgcaagaaaagaggacaatatgaacttagataaattacaacaatggttgcaagactccaataatgatcttgcttacatttctaatccaatcaccatttcctactttactggttactcaatggaaccacatgagagaatctttgctttaattgttttaaaagatgcggaaccatttattttctgcccagctttaaacgtagaagaagcaaaagcatctgcatgggatggcgatgttatcggctatcttgattccgagaatccttggagcatcatcgcaactaatgtcaaaaagagaactcacgatacccataattgggcaattgaaaaagatgatttgtctgttgcccactaccaactcttacgtggtgaatttcctaacgctagttttactaatgatgtttcaccttttattgaaaaaattcgtctttacaagacacctgaagaaatcaagaagttgcaaggcgctggtgcagaagcagacttcgcttttaagattggctttgacgcaattagaactggcgtcaccgaaagaagcatcgctggtcaaattgattaccaactaaaaattcaaaaaggtgttatgcatgaaagttttgaaaccatcgtacaagctggtaaaaacgccgctaatcctcaccttggtccaactatgaacactgttcaaccaaatgaattagttttattcgacttaggtaccatgcacgatggttacgcatcagattctagtcgaactgttgcttacggtgaacctactgctaagcaacgcgaaatttatgaagttgatcgtgaagctcaacaagccgcaatcgaagctgctaagccaggaatcaccgctgaagaattagatagcgtggctcgtgacatcattactaaggctggctatggtgaatacttcattcaccgcctaggtcacggcattggtaaaaacgttcatgaatatccatcaatcgtacaaggtaacgacttagttcttgaagaaggaatgtgcttctccattgaaccaggtatctacatccctggctttgctggtgtcagaattgaagattgtggtgtcgttactaaggacggctttgaaacctttactcacactgacaaagacttaaaagttttaccacttaaagactaattttagtcataaaaaaggagctgatcatcacgaccagctccttttctttttgactttaattaagcttgtggtttttctgaagtagatgctgcatcagtatcatctttttcagcattgttcaaatcgttaactgactcttcagcattttcactgtcatcgtcatctttatttgagtcatcgattacgatgtcgtcaaaatccttcaattctgaatcatcttcaacattcttagggaatgatgctaattgattcttaacgatttcagtaccattatcgtatttcttcttcaaatcttgaagcttgtcattatctttaatcttgttcttaacgtcatcaacttgttcatcactaacaagaagtgaacctgcgagaaaacctgctgcacatcctgcaacggcacctaataagaaacttgcgaattttttcatggtgaattcctcctttattaattttcacctctgcgacgcttgcgtcttgcaaatgccgtcgcagctattgaagaaataagacccgtacggcttaaatgattgctgctaaagcgtttagcgatctttttagatgaatcgtttaattctgatacgctttcgcctaaatctgcagcagctttaacaactggatctaacgtcttcattttaccattaacatcggtcattaggtcattagttttatctaacaaatccgaagtttgatccatcaagccatccatatcttcagaaattttcttcattgactcgttagttgtttgaatagttgcactagtttctttcaacaacttcgcggtccgaattagcattggaatcgtaaataatactaaaattaagaatgcaatcgccgcaattaagcctgctaaagcaccataagaaattgtcattttctacctccatcaacatctaaaaaaagtttagcatgaatatcctttattctcaattaatgtcttgttattcttaattatacccgtaagcaatagaaaggacaccaaatgaagattcctactcacataaatatacagaaaattgaaattgattggagtaaaattagccaaaatttattgtcaattatttggcaattagctattacttcactcattttttaccttttatcccattttggtcataaaataattaataattacttagccaagcataacacagttaagaataaaagaactcgaactatcacagctttgattaacagcgtttttcaatatacccttatcttcttctatttattcggtattctctctattctaggtgtaccagttggcaccttgttagccagtgctggaattttttccctagctttaggaatgggcgcacaaggctttgttagtgatttggtcaacggtttctttattctaagtgaagaccaatttgatgttggagatttagttcagattggcactaatgttggtaccgtcgtgcaactaggcctcagaactactcgtctcaagggttcagatggctcaattattttcatccctaaccgcaacattaccattgtgcaaaacctagcccatggcggtgtagcactagacattaatttggatcttgataccaaaaacgatattgatgaagttaacaagttaatcaaagaatgcaatcgtaagatccagcctgagaaaaagacaattgtatcaggtcctactattgtcggtgtgaccgaacaaacagggaaaaaatttgtttattccattcattttcaagttaagcctggtaaacaatctgctgtgaaaaatttgtatttgacccaatatattcaaattttacgagaaaataatattgcttttgcaagtacagaacgacctgcaaaaactactgcaaaataagtaaaaagtaactcagttcaaatcatacgaatgacccgaactgagctatttttatctaatcaaattgccttagccataaaatttactaaataattctgccaaatcaattcgaccaactgaatatggaatcttctctttagtcaatttaagtataagttgatctaatcctagattatcatccagtggcacaataattttattatcaggtaacttagtaaatcttttatcttttaaccgcgtcccggctattgcattcgcctcaattttcagatactgcttagcctgatgttgattatcgagatcttcaattacctttcctgccttcaagaaaagtacacgatctgcgtaagattgtagattatttaacaaatgtgaagccataataatcaatttattttctttttttagatctaataagtaatctgaaatcaattgtacgttttggggatcaagtccgttcatcacctcatctaaaagcattactggcgtatcagctgcaaccaccatggcaaaacaaagccgttgtttcatccccaaagaataagtttgtgttgggcgatcaacatatttttccatctgtaatttattaataatattatctacatttttatccgaatttttccaaagatccgcataaagctttaaatgatccctaccgctcataaatggaaacagatcactttgatcaggaaaagcacaaatcagtcgatgcagtttaataatctcacgattgctgcgataacgtaaatgatcatattctacataaccagcttgtggctcaagattatgtaaaattacgtttagtagtgtggattttcctgtaccatttggtgcaactaaacctacgatagttcctatttgaaaatttaaactaatttcatctaagacaacatgttcgccaaaagctaatttaacattatgaatttttaacatgttttcacctacttcactaatactacttttctaaactgacaaaatagccaaatagttaattcaattacaattgctaatgtaactaacggaataatcccatcattaaagtcccaacctggtgagtccattaaatacgataaattactagtcaaactttcgccgattgtaaaatatgtcattggtaagtgtttcaaaaatggataaacaaagcccatacccaatgaaaaataaagaactttagcactcattgccaaaacacttgaaataatagccgctacatattcatttctaaaaatcagcgacaataataaagtcaatctaatgaaaataaaggtaattacaactgcaaagatcaagaaaccaagataatattgtcccagcgtctgataaacaaagggcgttttgaaatacagacgaccagtataaattggcgttaataaattaaaggagccaaaaccataccttggcgcagtacacaacgtaacgactaaaaaagcaactagaaagttaaataaaattcccacttcaataaccgcagtttttagccaaagaattgtccttttagaaagaggaatattcttcactactgtacggtatttttgatcattggttatcatatctgccgcaaacaaaacaacaatcacaattaaaataatcatcgtccacccagaaagcgactgctgtaatctctgtaaagtagtccgttcttctaaaacatttttgtctaattttgctttacttttaagtaaaccatcatagaagtgaaatgttctttgatacccaaaatgtccatcttctttgtaattattattgtggtagtattccaagggatacatgtaattctgattttctttaacccaaatcaaattatccattttctgataccacttgctactgtatttggtatacaaacgccaatcatgattcttaagtgcttttaaacgctcatggtcatacttaatgatggtcggatatgtggtaacagcatctttagcaccttcactgggatcataatccgaagtacctttatctgcccgtgcaaattctttttcagccacctttaaaaaggcttgatcatcttgatattcttttgaaattgcatatggatcaacatcttcaatcacatgatgctgcggtgcgctgactaaaccaaagtaaagtgcaagcacgacggtaatgaaaaacagccccacatttttaggattagtcaaaaatatttttaattgaaataaaaaatattgccttttcatttttcaacaccaccttggttaaccaaatgcctgaaccagattaccagcactacagcccacactagtaaaatagtcataccaactgcccaatttgccggaataattgattgacttgcaacagtcccatctaaaaccttactgatatttagataagctgaaggtaaaaagaaaagatatttagcaatgctacccggtaaaagtgaaatactgtagaccaatgccgcaataaaaatcgttagataaacgctatgagttaattgattaagcaacaatgccaggctagtcacaaacatcactagtacaactgcatagactaaatacaacaaacaataaagccacagtggaaccgcgctaattttaccgaaatacaaaactgctggataattcaaactattaaagccattcttaaaaccagcaaataagtaacttcctaacacaccaatcactaacggaagcaaagtcaaagcaagattgatgataaatttgccttcaacttcatccctaatctgataaggaatatttttaagcagagttggatgtgataaattaatcatccagctatcactagcaataaataaaacgtagaaaaataagaacatgccgactaatcctaaaatatagattaagtaggtgctagattctttagaattcatgacaattgctaagtgatgttggtacaaataatcataaactactaatttttgttgcagttgatacttcggtggaacatttagcgttgaagcaccgcgataattattttgataacccgccagcatcgtttgcactaactttttggaattttgcaaataatcttgaggcgaatcaaatacttcaccattttgtacaccggccaaatactcagcctgtttattcagattattaaaagtttgtttgtaatccttttttcgtagcaaattgctagaaaaataatctgcattaacatgaactgactcattgtagtctcgccattgacggtagccatcgttgattttctgcttttctacaaccagtacagcaaaaatcatgcaaagtaccaataaaacagcaagcaacatattctttttcgacttacgtgcaattcgaaaagtggcttggaaatattgcgatctcatttttctttctccacataaataattttgttactaaaataacccttaggctaatcctaagagttacattaattattaaaattatagtataaacattaaaaaaatctaatactcttcatatttgaattaagtcttcatatatgactatggcaatctgctagatatttcgtttagtccattctgattcaagaaatctaatatctgttgactttgctttttattgccttgaaaatatgccttataaaaattagtaactatcacatatattccaaaatccggaatattagctaattcttctattatttcataaccatagcttgcatcttgagactgtaaaatagtttgtgtaaggatgaatgattccttaaatttatttctttaaacattagaaaaaggagttcctttctcgtatgattggtttgaacaaaaaaacacatacagaaagaagaactccttcatgaatgattttaccaaagattttgctcaagctctattcaatccagacaaaataaatgatttattgcgcaaagaactacaacaggctgttaataacttgctagaagctgaattgactgcctttctgggctatgatccctatgccagaaatggctggaatactggcaactctagaaatggtgcttatttccgcaaagttgatacgcaatttggcccaattgaagtgcaagtgcctcgggatcgcaacggtcaatttcatcagcacacgctgcctgactacaagcagcactcggatatcttggaaagcatgattatcaagctttactccaagggcgtgaccaccagggaaatagccgatctaattgaaaagatgtatggcagccattacagtccagctcaggtatcaaatatttccaagcagatgattccaaaggttgaggcttaccacaaacgcaagctaagcgacaagtttttctgcgtctatttggatgcgacataccttcctttgcgccgagaaacgtttgagcgttgagcgtgaagcagtctatattgccattggcattaaacctaatggacataaggaagtcattgactactgcattgctcctagtgagaacattgaagtctggacagagatgcttcaaaacatgaagtccagaggcttgaagcaagttgaactctttctttctgatggtgttgttggcatgaaaacagccttggccaggacttatcctaaagctcattttcaacgctgtttggttcatgtcatgcgcaatatctgcgctaaagtacgcgtcgacgatcgtgaaaagatcatgaacgaattcaaacaggtgcatcaacagacaaacaaagaagaagccacagctgtcctgcatgacttctataccaaatggggcaaggtttacagccatgttatcagaagcttgaaagacatagaaccagatctgctggtcttttataactatcccaagcagatcagagcttcaatttattcgactaacatgattgaatcatttaacaatgtgatcaagcgcaaagctaagcctaaggcagagtttccaactgaacagtcgcttgatgcttttattggtattcaggcaatgagctacaatgaccgttatttcaatcgaattcataaaggctttggtcaggttcaggacaccttagaatcctactttgattaaataaataattaaaaaatcaatttacgagaaagaactatttacacaaaagatttgacagtttcgactacaatcatttgtataacaattatgaaaataatttatgcaaatcgatgcaattatcttttgagtattaaatggtaatttcatcaacttccctttacatgttttttccagtttttttacaaaaagaaccagctcatcaaaatcaaacaaaagcattgaattacaaaaaagttgtaaggttgtaatatttttggtccaatcatcaacttcaaaaaattttctcttaatttgtgtaatttctctttgagttaaatcattaatcttattatttacaactgcatcaatcaaacgagctgatattttagtattttcatccatagctgcattttgtatttttgggactaacatactgattttctttttatcatgaatagaatatgcattaagtaattgaacttttaagtcttcctctaaattattattttccttaacatttagtttatttaaaaattcttcttcactaatgttattagcagctaaaatctttagtaaatctactgctactatttcattcttacctcgtcctacttttgaataaaacgattcactaataatccctttaataaattgttcctgtgttaatcctaaagaccgtctttcctctttcagcgcttccccaatactttttgacatatatatccacctcatttcactaaaaataactcagttcaaatcatacgaatgacccgaactgagctatttttaccttaatcaaattgttctaaccaagctggcaattcttggagcaattttcgcactgcattaccacgatgagaaatctcattcttttcatcagtagtcatctgtgcaaaagttttttctttttctggaatataaaacaatggatcatacccaaaaccatcttcaccacgtggtgcggccaaaatacgaccactgcaagtacctgacacaaccaagtctttatcaaattcacctggcatcgaaactacaatcgtagtccaaaatttagccgttcttttttcatccggtacaccgcctaattcagctaataacttggcgttgttctttgcgtcattgtgagcttcgcctgcataccgtgcacttctaacaccaggctccccatttaaggcatcaaccattaaacctgaatcatcggcaatcgtaggcaacttgctaaactcagctaattcatgggccttaatcttggcattagcttcaaacgtatggccactttcaatcggatgaggcggattgtctaagtcagcattcgtcttaatctcgatatctaccccagcttgtttaaaggcttcttttagttcttttgctttaccttgattaccagtcgcaaataaaatttctttaaccattattcattctccgtatccacatgcttagatgttaaagttgcatcatccatgaatgtccttgctaaatgatcaaaactagttggatcgcctgtagtgtaatattcatgactgactttttcattaccatcactaaacaaaccatcgcgccgcatcacattaaacgtatactgtgcaacttgatctgcaggatccaagatagtaacatttttatcattaattgcttctttaaattctttctgaatcaatggataatgcgtacagcccataattaaagtgtcaaagtcttttccttgtaagggggtcaaactctctttaactacttttaagttggtttcatgatctttttgagcctccacaagtggtgcaagtttaggagcagctaattccgttacctgaatttctggatcacggaaacggatctctttagcataagcatgtgattctgctgttgctttagttgaaactaccgcaacttttttattcttagttgtccgtgaagcggccaaactccccgactgaataactccgataatttgtggatcgatttctgcttgaatcgtactcatagccattgctgtcgcagtattgcaggcaaaaattatcagcttaacatttttatctaacaaaaaatggactgattttctaactagttcaataatctcttctttagttcgatcgccatacggcatatgagcgttatcaccaataaaaacagttgattcattaggcaatttttcaattactttttttgcaacagataggccacctagccctgaatccaataatccaatcggacgattatccataataaaaccctcttaaaatcaaaaatttattttctacttatactagtttacggtaaaataaaaaagaataaaagggatgaacaagtttatgacagaaaacacagaaaacacaaacgagcacgtatattttattaaccaactttaccgcgatttccttttgccaactattttaggcgatgatgacgcctcaattctttattgggctggcaagagaatcgcgcgaaaatatgatttaagtgattatgatgatttagttgaattcttcaacatggctgaatttggtaagctagaaaaagttaaagaaagacgatcatttactacttacgaattaagtggccaaactgtcactgatcgtttgaatagcgccagcaaggaattctcccttgaaggcggaatgatcgcggaagcatttcaaaaatcaactggtcgaaccaccgaatgtgaaattaatattttagataaagaaaagaaagttcaatttatcgctcgcttcggttaaaagcaaattgatagactataaataaccactactatatactttagttaaaatcgcatttttttagatatattagatataggagtagagcatgattaaagaatttaaagagtttatttcacgtggcaatgtaatggacatggcagttggtgtaatcatcggtgctgccttcactgctatcgtacaatctttagtaaaaaacttgatcaaccccctacttgggatctttgccggcaaaattgatttttctaacctcgtttttaaggttggggatgctacatttaaatatggcagcttcatcaattctgtcattaacttcttgatcatttcatttgtggtatttttaatgatcaaggctttaaatagagtaatgcccaagaaagaaaaagaagctggtccaactgaggccgactatttagaagaaattcgtgacttgctaaaaaagcaagtaaatcaaaataagtgatatatcaaaaaagcttgaggcaacatcgtctcaagctttttttgatttttaaattaatcagtatattgatccaaaatttggtttaacttttcctttggagtgtaaccagtaattcggtctacaatattgccatccttctttacgattaaagtaggaatagccataatacccaaattcttagctgtatcttgattttggtcaacatccatcttgtagaagttaacgtcttgacgttcttcagataattgatcaattactggtgattgcatcttacatggaccacaccaagttgcccaaaagtctactaatgctacaccattcttagtttcttcttcaaaattttgatcattaattgcttcaaccataattattacctcacattttttcaattcatttatttatattataagtatattctattatacttactttttgcaagtaagacgcttactttaattgtacaattgttgcaccattgccaccttcattagctggtgcataattaaagttctttacatgattgctgctgcggagatattgccaaacaccttttctaatcgcaccagtaccaataccgtgaataatcgtaaccgtatcaagtcctgccagtaaaacagaatcaatatatcggtccaaattagtcattgcttcatcatagcgttggcctcgcaaatccagctcgctatgagcattacttcttctaaccgcactggttgctctaacagtttgtctaggcttagtactttcgcccttttcaatcctctcaatatcgcgatcactaaccttaactttgataattcccatctgaacctcatattcatgttcagataacttcttagtaatcgtacctgtctgaccatatgagaggacctttactcgatcgcctacacttacatggtgacgacgtttttcacgctgtaagaccttattatgagccaaattattagcctgacgctctaaactgttgagttcgcctttagcttcaataatcttattttccttgacgcccatgttcttttgtttttcaagttgagcaataatctcatcagcttttttacggcgtttggcaacaacttcattagctcgctcttgtgcaaaatcaagctgtttttgtacacgttggttataccaatcaagtgcttgttgcaacttttgctccaatttttggctccgatccaaactggtttgcagacgattgcgagccacagtagctgccttggtttgcgtattcaacttggtgatcatcttattaatatcagaatcttcatctgacattaagttctgggcatttttgacaacatcttcacgcatccctagcttgcgggcaatggcaaaggcattactatgaccaggaataccaatctgcaaatgataagttggcgacaaggtctttaagtcaaattccattgaggcattagtcgtccgtggccgattataaccataaagcttcaattcaggatagtgcgttgtcaccatgatcttagcatcttttttacgcaaaaagtctaagatactaattgccaaactagcaccctcttctggatcagtccctgcaccaatttcatcaattaaaactaaggtctcagaatcaacattcttcatgatcgcaataatgtcattgatatgtgatgaaaaagtacttaacgattgttcaattgactgttcatcgccaatatcagcataaacttgcttaaagacgccaaccttgctaccttcttcagccgggataaataatccagactgtgccatcaattgaagcaatcctgctgtttttaaggtaattgtcttaccaccggtgttaggccccgtgatcagcatagtatcaaattcaccacctaaacgaatgtcattaggtactaccttttctgggtcaatcaatgggtgacgcgcttttaataagttcaaagaatggtcttgtgtcagacgaggctcacttgccttcatttcttttgctaacttggctttagcctgcaagaaatctagttcagttaatgcagccgcaatattattcaaactagtaatttcttcacgagccaaattagataagtgcttcaaaatattacgaatttcttgtttttcttgagcaattaaattctgttggcggttattaagatttaaaacggcttccggctctataaacagtgtttgaccactggcactttgatcatgaactaccccaccaaattttgcccgatattcttgcttaactggaataacatagcgatcatcacgaatagtcacaatttgctcagataaatacttactactattgcccttagtataagcatccatcttattcttaatttcctcttcattagaacgtatatcatgacgcaaacgagctagttcatgtgaggctgtatctaatacctcaccatcataatcaactgatttctttaattctctaaataaaagatccggcacatctaattgatctaaaatttcatcaattgcagttaaatccagtttgtttggatctatttctgccaaaaagtcattaatttcatgagctaaacttaatactaataataaattacctaattccttagcatttaaattagctttcacgcttaaacgtttagtacttggacgtacgtcctgaaagtccgttaaaggaagttgtcccttaattcgtagcaaattagtcaaagctaaagtctgctttaactcattttgtacttgttcaaaatcaccactaggtaataattcctccgcttcttttttagcgggaccagtaatcgctaatttactcaagcgcttagtaatttcgccaaattctaaaatctctaatattttcttgttcatttttatcttttttctaaaactaacaaaaaggaccagccacagccagtcctctttttattatttaccactcaagcggtcatcatctaagaaagtatttaaaactccctggaccatgtcccactcatcatcagattcaatctcatgcaaatcactacttgttacatcgccggcatcatcggcatcataactgaaagcttgcacctcaatatcttcatcatcgccaacagcggctggataaagaagcacgtaagatttgtcataatcatctgaatgaaaagtaaataatatctcatacaattcttcattaccttgatcatcaatcaaagtaatttgacgatcttgatcgtcaccattaacttgtgctgccattttaatcctttcggtgtaaatctaaataattttgcaagatgagcaccgctgccatctgatcaattacttgtttacgcttcttgcgatcatggatccctgcatcctcaacaagtactcgtcgtgattcaattgttgtcaatctctcatcagaataatgtacaggtaaaccaaacttttcctctagtcgtttgccgtatgccttacttctagctacggaactaccagaagtaccatccatattcttaggtaaacctaatacgaaaccgtcaacttcatactgtctgactagcttcttcaatggacgcataccaaagttatatctgctttcatcaatctggatagtctccaacttctgggcagtaattcctagctcatcgctaattgctactcccacagttttagaacctacatctaaacctaataaacgcattatttattcttaccaagataactcttaacaagttcttcaataatctcgtcacgttcgtgcttaagaatcaaattacgggcatcgttatgccgtggaatataagcaggatcgccagaaagtaagtaacctacaatctggttaataggattatagcccttttcttcaagcgcattgtaaacatcttgcagagtatcataaacattttttcctttgttctgattaaagtcaaaatgcatagtcttatctagcgaactcatatttattcctcctgtcaacaattttacttgaaaaaaagcttaaacacaattaattaattcttagttcttagaaatttcgtcaataactgccttaatagcatcattcaagcctgctggattcttaccaccggcttgagccatgtttggacggccgccaccgccacctccaaagattggggcagcgatcttgattaagttacctgctttaaggcccttgtctaatgccttttggtctaaagcaataatcatattagccttgccagcattttcagcagctaaaactaaaacatcagacttgttgccgctcttccagttatcagcaagttcacgcaagtcattcatcccgttaacatctgcagtagcagcaatgacagtcaagtcaccagcttgtttaacgtcattaaagatttgaccagccttagcagcattgatcttcttgttcaaagtttcaacttgcttttgagcatcgtgcaaatcactttcaagtgaatcaatcttatcgacaatgttatctggcttggttgccttaacttcttcttgaatatcatcaagtaagtctgaacggtttgccaagtattcataagccttcttagaagttacagcttcaattctacgcataccagcaccgacagctgattctgaagtaatcttgaagattccaatttggttagtattgtccacgtgagtaccaccacagaattcacttgagaagtcacccatttgaacaacacgaaccttatcaccgtacttgctatcaaagagggctaaagcacccatcttttcaccctcttcaggggtagtgatagtagtcttaacttgaatagcttcccaaatcttttggttaaccaattcttcaacggtcttaagctcacgcttggtcattggttccattgcagtaaagtcaaatcttaagtagtcaggatcaactaatgaaccagcttggtgagtgtgttcacctaagacttgacgaagagcagcgtgaagaaggtgagttgctgagtgagagtgacgtaacccttcacgacgttccttatctaacttcaatacgtattcttgacccttttcaactggcaaaatcaaatcaacaaagtgcaagttttggtcattaggagcgtgttgtacgtcagtaaccttggcaaccaattcaccgtcttggttgtaaatgtcaccgtggtcggcaacttgaccaccacgttctgcgtaaaatggagtcttgtcaaagaccaaagtagcatgttcgccatcggccttatcaaccaacttatcatcaacaacaatgtcaactagctttgcatgtggttcttcgtaagtatcacgttcaaagactgacttatccttaatgttcattaaagttacatcttgacgtcccattgattgaaggtcaccacgagctttacgtgcacgctctttttgagcagccatttctgcatcaaagcccttcttgtcaaccttaaggccagcatcttgtgctgattcaaaagtcaattcatatgggaagccgtaagtatcgaacatcttgaaggcatctttacctgaaatggtcttatccttagaattctttgccttgtcgattaagtcgtcaagcaaagtcaaaccagtatcaagagttgattgaaatctttcttcttcgttttggataacgttttcgataaagccgcgttgatccataacttctgggtagtgactttccatgatttttccaacaactggaaccaacttgtaaaggaaggcacccttaattcctaagcgttgaccattcaagtctgcgcgacggatcaaacgacgaagaacataaccacggcccgagtttgaaggaagcgcaccatcagcaatcgcaaaacttacggcacgaacgtggtcagcgataatcttgaaagcagtagtgtcttccttgttaacgccgtacttcttgtcatcagtcatttcttcagtggcgtgaataattggcaagaacaagtcggtttcaaagttggttggtgcatcttgcaaaatagaaagcacacgttctagtcccatcccagtatcgatattcttgtgtggttggtctacatatttgccatttggcaagtggttgtattgtgaaaatacgatgttccaaatttcaaggtaacgtgcattttcaccaccagggaagttttctggatcgtcttcagcaacgtcgttgttttcttgaccacggtcgtagaagatttcagtatcaggaccacatggaccttcaccaatatcccagaagttatcttccaacttaacaatatgatcagctggcatccctgcctttacccaaacattaaatgagtcttcatcttttggataaacagtacagtaaagcttttcctttggcaagccaagccaatcaggactagttaagaattcccatgcccaaggaatagcttcatctctaaagtagtcaccaactgagaagttaccaagcatttcaaagaaagtttggtgacgtgcagtcttaccaacattttcaatatcgttggttctgattgacttttgagatgaagtaattctgtgattttttggtacaactgagccatcaaagtacttcttcatggtagcaacacctgagttaatccaaagaagagttgggtcatcttgtgggattaatgatgcacttggcataatcatgtgaccatgatccttgaagaagtctaaaaacatttggcgaaactctgaactatttagtttcttcattaaaataaatctccctaaaaataaataaaaaacactattgctttcttcaaggacgctccacgcgcggtaccaccttgattgcaacagtgtttgttacctcttgatattcttaattatgaaacttaaaggagcattttttgactattattaagccattctcatctaactggctctctctttgaaataattgatcaaaaaacatatcttaagctgaaataattgtactacaaaatccgcttctgtcaaagcccttgttcacgcttgcgctttctcaaacgttttgccttacgaacctcatgacgctgttccaacttacgtttttgacgattatcctcttgaatcgcacgcttaatcttcttcttgtaacctggcttacgctttctcttctcttttttaacgtaacccaccagcttggtatcaagcttacgattcttgctttgacgattttcacgactgcgatagtgtttacgtggcactaattcaccattcttaatctcaacaaagtcaaaatgaacacccattttttctaggtcttcaatccggttcatttcttcttcacgaatcaaagtaatggcgtgacctgacaaaccattacggccagttctaccaatccggtgaattacaaactcaatatcacgtggtatttcataattgacaaccagactaacaccatcaatatctaagccacgagcagctaggtcactagctaccacatattgatactgtccttgctcaacctgacgcagagtacgctttctttcacgttcagttaccccaccgtgaattttagctaccttcaaaccctgatcttgcaaataattagtcaactcatcaaccttttgcttagtgttagcaaaaaccaacgccaaatatggttgtcccatagttaacaatttgtacaagacattcttgcgatcctttgagccaatatcaagcaaatcgtttttaatcgttggcgcaataacactaggattatcaataacgatatcatcaggatgagccatatatttgcgtaaaaagttagacaatttaactggaatagttgctgaaaaggcagcaatttggacatccttcggcaatttagcagcaacttgatcaatgtcgttcaaaaagcccatgtccaaggtcatgtcagcttcgtcgataacaaaagtttttacttgatcaactgcaaaaaccttcttttgaacaaagtctaacaaacgtcctggagttgcaatcaccaattgtggagtattattttgatacttttctaattgacgttcacgatcagttctgcccgcaagatgtgcaattgaaaaatgcatccctgccgcatcacggagctgccgtgctacttgataaagctgatcggctaattcacgactaggcaaagtaacgattgcttgaacatagcgtttatcttcttcaatttcattaaaaattggtactaaataagcatgcgtttttcctgaaccggttgctgcttgcactactacactcaagtcagacaacatagcaggaataactttctcctgcaccttagttggcttttcaaaatggatcttctttaaaccagcctgaatagctggtttaattcttgaatctataaaaatattattcatgatcttctttaaacttcttagttacttcaacgacttccgcaaatacctgctttacttcgtccatatccttagcgttagcaccactagctaatgcatgaccaccaccatcatgcttagcagctaattcattgattacagggccctttgaacggtaatgtacgcggaaagtaccatctggtttttcaacaaaaacattccaagcaagcacatctttaatacgtcctggagtagatacagcaacatttgcttgatcatcagtcaaacctaacttcttcaagtctgactgcatcaaaattgtaaaagctgcaccaacgggatcaatttccatcttgtccattgccaaggcttgcaattttgcctcatcaaaagttacatcagcaatattacgagcgatttcagtaatgttaattccagtagaagctaattgagcagccaccttaaaagtatgctctgaagtttctggatacatgaaacgaccggtatcgcctacaattccagcataaagtgggtaagcaacttccttggtaatcttaaagccctcttcattcaagaagtctacaatgatttggcatgctgctggagcatctggatctacgtaactcatatcagcatatggatcaacatctgggtggtggtcaatcttaattaaaaagtcacccttatcatacaacttattagaaattcttggtgtattagcggtatcagtagtaattaccaaagcaccttcgtaatcagttgccttgacttgatccatgtggttaatccaagctaagtcgccttcatcgttttccccagcacaaagtatgcgcttgtccgggaatttttccattaatgctctagctaaaccagcttgtgaaccaattgcgtctggatcaggactagtgtggcggtgcaagataattgtaggatattgtaagattttttcataaatgtcatcaaaactactcatttttaatctcctcatcttgtaaaaatatctgtatctagtttaccagaaaaatagctttatttattagtcgaacaaactgattgattgatattttttcttttcaaagtcagttacagtgactcccaataaacgaattccatcatctaaaaaggaacttgttgcttcgaacaagtcacgagccacatcataaaaatctaagtgactatcagaaggtgttttcaacttttttctcttggttaccgtatcaaaattattatttcttactttaataacaacagtacctgccttaaaattgcgtttttttaatgctgcttccaaatgattgcaatagttacgaatattggttagggcttcatcctcagtataaattgcaggctcgtaagtccgctccatgccaattgattttcgattagcctctgagtctgtaacaacaggtcttaaatctattccacgtgcatgttgggctaaaatataccccattttcttaaattttttaattaaggttaaaacctcaattttttgtaaatctgccccagtataaacacccatctgatgcagctcttcttgcgtcttcggtccaataccaggaaacttctcaatcttttgcattgctaaaaagttctgcacttcactaggcaaaattacggttcgaccaaacggtttggcgtattctgatcccattttagctaaaaacttattataggaaacgccaaaagacgagtttaagcctacttcttgccgaatccttttctgtaaatctaaagcaatttgaactgcagactcctgctctatctttggatgtgtcacgtctagataagcttcatctaaagccactgattcaacctgatctgtcacatcatgcataaaagaatggattttagctgacactgcacgatatttatcaaatcgtggtctagtaaaaactattagctccttgggaaccaaacgtactgcttgaattgcggccatagctgaatgaacgccatacttacgagctacataattgcaagtagccactactccatgtccaccattttgtcgtggatcttgcccaacaatcaatgccttatttttccattcgggatgctcccgcatttcaaccgaagcataaaaagcatccatgtccagatgaataatccgacgatggatgtcattttgcggtaataaattttctttattcataaatccaatgttcagttggtgactcaaagattgtattagcttcctttggccccattctgtatggcaaatattgtgcaatggctggattgcctgcttcattttccttctgccaagcatcttcaactgcatcgataaattcccaataacgcttcaattcgctccagtgcgtaaagttagttgaatcattgacaaaaacatcatgaagcaatctttcataaccatcaggtaccttagccatttcggcttttgaaaattcataagttaagttttcacggcgaattcctggttggtcaattcgtttgccattaatagtaaagtaaatttcactagttgggtcaatcacgatcgtaatattgttagaatgagcttgcccatatggattattaatatgctttaaaacaatgtcaatccggttcttcttttctttaaattccttacccgttctaaagtaaattggtacgccagcaattggtccctcattaaacttaactttacctgcaacgaaggtttcagtagttgactctggatcaacatttggctcttgcttataagcaaaagtagtatcactacccaaatattgaccacgaacaaagtatttcttgacatcatctggcgtaggaataattaaactcttaagcaaatcttgcttggcttggtgaacactagcagaagaaagatccttaggttctggcattgctagcagagtaataatttgaaaaatatggttttgtaccatatcacgcaaagcacctgaagtatcatagtaacctccacgtgcttccacgccaagacgttctgccaaggtaacttggatattcttaatatacttgctgcaccaaatattttgaaccattgggttagtaaaacgcattggcatgatattttgaaccatttctttacctaaatagtggtcaattctaaaaatatcattttcatcaaatgaagccgtgatttgcttatttaattcctctgctgaagccaaatcatgaccaaatggcttttcaactacaattcgattaaagccactaccagtcaagtcttggtcattaatatgcgttgctattgtgccaaagaatcttggtgccatagccatgtagaagagacgattgccttgtgcactataacgatcatcgagctcttgtgccaagtttttcaaaatctcatagtgttccacattagttacatcatgtgattgataataaaaatgacttgcaaaagctttcaactcattttcatcaacagtatcgtgcgtttcatgaatagcatcactaacctgctcacgcaaatactcatgtgaccaaggacgacgagcagttccaattactgcaaagttgtcgtgaattaagccttgttcatacaaattaaacaaagctggataaagcttgcggtgagccaaatcaccactaccaccaaaaagaatcattacaacgggaatattcttcatttcagatccctttctttgaactaaaattatcacttctattttacaacaaggatttttttagcaaaacaaaaagcgcctaaaatgacgctcttaagtaatatgattacttatcctcttttttagtttcgtctgctttttctttcggcttttctgctggagcttcagccttagtttcagctgcaggagttgctggtgcagcaactggaatcacacgacggacagccattctttcaaaagttaagtaaatgccatctgcatcaaccacgatagtcttatcactgttgatcttgtcaaccttaccatgcaaaccatcaactaagatgacttcgtcacccttcttcaatttgtccatcatttgcattctttgttgttgttgcttcttttgaggacgaatcataccaaagtaagtgaaagcgatcaaaataataaataaaccgatcatcatccagttgctacttgctgcagcaccggcatttgctaaaaataaaatgttcaaaatttccacctcattaaaattattttctagatattataaccattatacagaaaatgggactatttatcacctggaattggtaatcctaactgtaaatatgctttatccgtcaccattctgccacgcggcgtgagtaaaataaaaccatgctgcaacaaatatggctcatatagtgactcaatcgtttccatatcttcaccaacattagctgccaaagtccgaataccaacaggaccaccattatatccttcgatcatcgttctcaataatctgcggtctgtctgatcaagtccctcatcgtcaacctgcaattgttttaacgcgccttcagtagtctcgagcgaaattgttttttctcccttaacttccgcaaaatcacgcacccgcttaagtaagcgattggcaacacgaggtgtaccacgcgagcgtcgtgccaattcatgggccgcctcaggcgcaattgaagtgtgaaaaacatcacttgaacgcaaaacaatttgttctagctcatcgatagtgtaatactgcatgtgctctacgatgccaaagcgatcacgcaaaggtgctgacaattgcccagccaaagtcgttgccccaattagagtaaatggtggcagcggcacgtgaactgcatgagtagtctgcccctcgccaatcacaatatcgatatagtagtcttccattgcagagtagagtacttcttctactggcttagctaaacggtgaatttcatcaatgaacaaaacatccccaggatctaagtcggacaaaagtgccaccaagtcgcctgccttttcaatggccggaccacttgtactctttaaatgaactcccaattcattggcaattacgaaagccaaagttgtctttcctaaccccggtggtccataaagcaaaacgtgatctaatgcttcatcacgttggcgcgccgccttaatataaatgctcatttcttttttgacccgcttttgacctaagtactggtcgagcgtttgcggccgcaaagaaagttccatttgttgttcttcaggattctcaatatcacctgaagttacttgatcttctgccaccagtttcacttccttaaaaaataatcatctgttctattataccaagatctactttttaagcagtaatgctaagccctttttaatatattgatctgcagtatttgcagcaactttctccagtttaggcgtgatccgatccacttctttttgggtataacccaaagcaattaaagcaagcagtgcatcatttaatgctggcggcacattctcaccattgtctggacgatcaagccgagcaacataatcacctaatttacccttcaaatcaagcacaatttgtgaagccgtctttttacccacacctggaaaacgagttaggtacttaacttcaccttgttcaatcgcttccgccaaagaattactatcctcagctgccatgattgccattgcactcttaggaccaatcccgctaacactaagtagttttaagaacaagcccttatcatcttgactttgaaaaccatataaagtaatgccagtatcacgcaccacttgctcaataaagaccttagctttttggccttgagtataggcaaaaggtgtaggactatagaccttgtagccaacgcccccgacatcaactacaacatagcttggtgtaaccacagtaatcacaccttcaaaatattcgtacattattcatccttcttaaacatttttctcaattcattttggctcattctaaccaaaattatccgtccatctgcatcatgatatggatcagtacacttgcgtaaatcaagtaaaatttgctcagcttcagctgcagataatttaatcttgccagtaatttctcgcttagcttgcattgctgctatccggctaaacaggttctttgcctttcctttatccacattcaaataaccatctaaaatcttccgaattgaatcttcgacattatcgtgaatccaagttggatacgaacgaacaataaaactattttgtccaaaatcttccaaatagattccaacctgcttaatctgttctacttgatccttaatttgcataaaatcaagattaccaaattctaaaataattggtgttaacaaaccttgttgtactacttttttggcagttatcatgtgaaaaatttgctcaaattttaaccttcgtctagcagcaacctgatcaattaaaaataggtcgccattatgttgggcaaataaataagtatcggtctgtccaacataaaccaagcgaggcagattattagctaaagtttcatccccacttgaaatgacttcctgattagtcctagttgtaggaaatggcgttagtgcttgctgcagagcaacattttgtttccaggtcttagtaacgatatattgatcatcttcacgtggctgattaagatcaacatatttcttttcactatcctgctttaccgcctcattttgaatattatcttctgaatcatcagattcaatcgttaaaaattttggcttttcttgttcgcgaatttccggttcttttttacgagctgtatttacaacatcttgatttaagttaaaactaagctgatcaactagcgtatcacgtttattttccaaattagcaaaagcgctaatttgtccaactttttccacaagtgtattactaattgcactggtgattaaacgacccagttctttttccttggataaacgaacttcctgtttagtgggatgcacgttaacatccactaacaaaggatctactttaattgctaacacaataatcggataatgccgcgctgctaattttgagccatagccatccagaatcgcagtatttaattgaaaatttttaatatagcggccgtttaagagaatcgaaataaaattgcgtgtagaacgtgttaattccggtttagacatcagacctgtaatcttaaaatcgctgtcttttgcctcaaatttttccattttttctgcgatatgacggccatacacgttagcaactgtttgctttaaattattatttcctggcgttcttaataaaattttgccagtatttgacaaagtaaaagacacatgtggataacctaacgcaagtcgattaataatatccacaatcttcataatttcagttcttgaactacgcaaatactttaatctggctggcgtgttaaagaacaaatccttgactgtaatttttgttcccttacgagccgctgcatcttcttggccttttttattgcctccactatagttagctcgaataccaattgcgttttcagttgcagtcagaatttccacatggctaacagcagaaatcgaagctaatgcttctccgcggaagcctaaagtggaaactttaaataaatcgtgttcattggcaatcttgcttgtcgcatgtcgggtaaaggctagatcaacttgatcacgtgcaatccccgtcccattgtcttgaactacaatctgtttcaaaccagcatctacaaaatcaacgcgaattcgagtagcaccagcatctaacgagttttctactaattctttaactacgctagctgggcgctcaattacttctccggctgcaatctgattagttaaagtttccgataactcatgaattttgctcattaatcgtcatcctttaaatctttttgccaatcagctaccatttgcataacctgcaacggtgtcttatctgctaaataaagattagaaatatcatcaagtatatcttgttgtgcatcagttattgcgggcttgtcattttgtgtttcagtttcttcaacactgttttccacaggctctgcaaataaatctaattgctgcgaaactggtgctagttcactgccttgtgcttcaagccgctttaataatttagttgcctctcgcaaaacgttgcgcggcaaacctgctaattgagctacatgaattccgtaactttgatcagcaggtccaggtaggattttatgcaagaagattaacttgccattttcttcggtagcaccaacgtgaatatttttcagatgatccagagtctcatccatcactgtcaattcatgatagtgcgtagcaaataatgccttagcaccaactttgtcgtgtaagtacttaacaattgcaccagctaaagccattccatcgtaagtagccgtaccacgaccaatttcgtcaaagagaaccaaactgcgcttagtagcatactgcaaggcttcattagcttcactcatctctaccataaaggtactttgacctgaaattaagtcatcagctgctccgattcttgtaaaaatttgatcaaaaattggcaaatcagcactatcagctggcacaaaggaacctacttgagccatgatcgcaatcaaagccatttgtctcatataggtactcttaccagacatgttaggacctgtaattaaataaatgttggttccttcatccattttgacatcgttaggaatatatgaaccagccgtcattactttttccacaactggatgacggccgttagtcacattaatatcttgattatctgcgtgaaaagttggccggcaataattattttgttcagctactgtagcaaaaccacaataaacatccagcgctgctagttgcccacctaatttttgtaaagcagggatatacttcttaacgtcctcacgcagcttaacaaataaatcatattccaagtcagttgaccgtgtctgtgcctcaagaattagattctcatgttccttgagttccggtgtgatataacgctcagcgttagtcaaagtttgtttacgcgtataacgatcaagtggcaccttagacttgttaccgttagaaacctgaatataatagccaaagaccttgttataaccgacctttaagttatcaatacctgtcttttgccgctcatctgcttccatttcagccaaccatttttttccattgttcatggcatcccgatagcgatcaagctgcggatcaaccccaccttgaatcaggccaccttcagtagtcaacacaggtggatccttcacgatagtggaagtaatcatttcggcaacgccctttaatggatcaatttttttagcaaaatcgaccaagatatctgaatctgattgctctaaagcatctaaaataactggaacggcctgcaaagaacgtgataattgtagtaattcgcgcgcattaacgttaccaaaagcaattcgaccagttaaacgttccaagtcgtaaacaccctttaaggcatcaactgcattttctcgtgtaaagtagccatcaagcaaggcctgcaccatttcttcacgatggttaatttcatccatgtttaataatggacgagctagccactgcttaagcaagcgtccacccatggcagtgtgtgttttatccaaaacccagaaaagtgaacccatttttttgccagttttggcagaagcaaccaattccaaattattctgcacagtatgtgacatctgcaaatattgatttacttcatagcttttggcaatctgcaagtgcgctaaacttctcttttgagttgaaagcaaatagccaactaactgacgggtagcctctttttcagccccattagtcaaattctgttcaacataagaaatttcagcatgttcaccttcaattggagtaggtcgagaaatcgtaatgttggccttgtgcataaagtctttattttgttcagataatgacccgttatacacaacttcacgagtacgaagtgacaagagctcattggaaacagcatcgaaactctttaaatgagtagcataaatttcaccagtggataaatcactgtaggctaaaccaaagccactcttagtggtaattactgatgttaagtaatttgaatctttagcatcatttgggccttcattcatcatggttcccggcgtcactaattgaataattccccgtttaaccatgcctttggcctttttaggatcctcaagttgttcacaaagtgctactttataacccttttcaactaaagtatttacataagtatccacagccatatgaggcacacctgccattggaattggattcttagttctatttgatcggtgcgttaaagtcaattcaagaatctgtgcacctttaactgcgtcatcttcaaacagttcgtaaaagtctccgacgcgataaaaaagaaaggcatcaggatattgttttttaatttcgtaatattgctccatcattggagttgttttttccgtcatttatgtctctttcctatttcgtattttagatagagttacgtacaatattatacgctacaaaaagaaaaacttcgaagctgaactgattgtttaacttcgaagtcattttaattatatttgtttttgaactagagtgagagtttgtgcataagtttagtgctaaagcactgtaaatgaacttgattacttcgtaatcaagaattatatatctaaatgctaaagcattaagatatataattacatacccattcctggtgcaccagcttgtggagctgggttagctggcttttcttcaggaatttctgcaacaacagcttcagtagtaagcagaagagcggcaattgaagcagcattttgcaaagcggttctggttaccttggttgggtcaatgataccagcatctaccatgttttcccaagtatcagtagcagcattgtagccaatttcgttttcttgcttgagtaagtggttcaaaacaacttcaccattcttacctgcgttttcagcaatttgacgaactggtgctgacaaagctcttaatacgatttggataccagtattttcatctgcagtatcagccttaagatcattgatagccttctcaacgtctactaaagcagtaccaccaccagcaacgtaaccttcatcaacagcggcacgagttgagttcaaagcgtcttcaattctgtaacgacgttccttcaattcggtttcagtagcagcacctacgtggataacagctacaccaccagttaacttagcaagacgttcttgaagcttcttcttgtcaaagtctgaagttgattcttcaatttgctttctgattgaatcttcacgttcttgaatagcatcctttgaaccagcaccgtcaacaatagtagttgagtccttggttacagttacacgacgagcttgacctaattgatcaatcttagtgtcccttaattcaagacctaagtcatcagtaatcacagtaccaccagtcaaagcagcaatatcttgtaactgagccttacgacggtcaccaaagccaggagccttaacagctacaacgttgaaggtaccacgaatcttgttcaatacaagtgttggaagagcttcaccagtaacgtcatcagcaatgatcaataatgacttaccttgttgaacaatttcttgaagaagtggcaagatatcttgaatgtttgagatcttcttgtcagtgatcaaaatgtaaggattatcaagatctgcttccatcttatcgttgtcagttaccatgtattgtgataagtaaccacgatcaaattgcataccttcaactactgaaagttcagtgttgataccacgtgaatcttcaatagtgataacgccatcgtgaccaaccttttccatagcgtcagcgattaagttaccaacttcctttgaagatgatgaaactgcagctacgttagcaatttggtctcttgattcaaccttgtggctaatcttgtgcaattcattaacagcagcttcagtagctttttcaataccacgacgaatgccaactgggttagcaccagcagttacgttcttcataccttcattagtaattgcttgagtcaaaacagttgcggtagtagtaccgtcaccagcaatatcattagtcttttgagcagcttcagcaacaagtttagcacccatgttttcgtagtgatcctttaactcgatggactttgcaatggtaacaccatcgttagtgatgtcagggttgccgtaactttgttccaaaacaacgtttctacccttaggaccaatagtagtcttaacagtatcagctaacttattaacaccctttaaaagagaacgtcttgcattttctgagaatttaatatcttttgccatagattatctatgctccttaatttacttaattatcgttggaaattttaactaaattacttagcaatagctaaaatgtctttttcgtgaaggactaagtacttttcaccttcgtattcaacgtcagtgcctgagtatttatcgtaaagaactacgtcacccttcttaacagccattggaatcttttcaccgtttgatgcgtaagcaccttcaccaacagctacaacttcgccttcagttggcttcttcttagcatttgatgctaaaacgatgccaccaacagtttcttcttcttctttcttaactttaacgatcacgcgatcaccaattggttgtaacacgtttagtcccccttatgtttaattttcttcattatattttttattactgtattaatcattagcactcttatttgctaagtgctaacttacaaatatgataataaactgttttgtgaaaaaaagcaagaaaaaattagcacttttttcaattgagtgctaattttgatttttcttaacttttttaactaattacagtaatcaaaccatcaataatgccgtaagttaatcccattacatagtacttcttataagcatcccagaaatcatggcattctttcttatctttaccatcaataaaaaaatatttaccactttttctgctgctaaaagtcttaaccaaagcatagaaaacagcaactagcgccataataatgaagaggatgattgggaagaagtagccaataatattttgtaagttatatgctacacctgctgcaattaccactaatagataaattacagcaactagtggattgcagatcaaacgtggcatttttactttaaccgacaataacagcgataaaagtagcggcaagcttaagataattattaaaactaacacgtaaatattattgatctcttttaattgagacgcaaaagtatgatcaagcttaccccagaaaatacttagaatacctactacccaatagacagccgtcataatccagacatgtttaagcgtgctgttctttttcattcttattatcctttattgattagcaaaattatagcatagagcatactatttaacggggcgagcataagtgattcgacctttggccagcttatcgctcagtgagctacctaaactagagcggtgcacatcatctacacctaagttgccgccctcttcaataatttgcgtgtcccaaccatcatatttgccatcaacaattgctgcatgtccgttttgaccaacaccattgccagtattaacaatcacaatatcacctgggcgaatattcttggcagaaattttcttcaaatagccatgagtacttttagcatctcgttccattggcagagtaaaaaatggagcatttcctacacgatatcctgctctcttcattacgatccacacaaatcctgaacaatcagttgaaccgtttttattaggatgacgccaactgccaaaattagttcggtatgcacctgttccataagtgaaatagcctaataatttacgagcattcttaatcactctattatgatatcctgaatcatcgaacatcgctggagatggatcctcattaatgttgtcataccaagctatgtcaaaattcacatcatcagagcttaattctgttgactgatctgaatcatcattcacatcatcttgtgcctgatatgcctcaagctttgctttttcttgagcataatttaaaacattattttgtttaatgtatgcgttaggaccgatcttataataagcagtaccattaatcgtcttagttccttgcacattaatgaacttgccttcatatagttgtgattcaattactggaacattaccggtttgtatctgaccacgtgtcttaaaactggtcctcttaccattactcttatacacattagaagtagttttaactacataatctgtcttaggattaggcactgttatcgctgcctttattttagagctagttagattaatgctaaagacagttaatccagttactaatactccaataactccactttttaacttcataaaacataccctcactttgtttttctttatagagaacattttactcaaacttaaaattgaagtgcaacacttagtactaaaaaacgccaagaaacaatctttcttagcgtcttttattctaattgttttaattttttctagaggagtagaagaaactaattgtgtgcagtaacagcaatcaacttgtcgccgtgcttgtcacccgcatcagtaattcttgaaacatttgcatagttggcagtgttagtaattactaccatgacagtagtatcatagcctgcctttttcacagcatcaaggtcaactgtaccaagcttatcgcccttgttaactctttgaccttgcttaacgaaactttcgaagtgctcgcccttaaggtttacagtatcaagaccaatgtgaatcaatacttctgcaccatcgtctgacttaatgccataagcatgcttagtttcataagcaatagtcacagtaccagtaactggtgaatagatcgtaccatcacttggaataacggctgcaccatcacccattaacttagcagagaatacttgatcattaactttagttaaactctcaggagtaccatcaactggtgaagcaataacttcatcctttaatgccatttgttccttaccaagcttttcagccttttgagtttcttcagcataatcagttgcgtcgtttactggaacatcttgttcagcaacttcttccttcaaatgacccttaccataaacataagtaaggatgaaggcaacagcaaaactaattaatacggaaacaacccacattggaatagtcttaggataaattgaaaggaagcctaagaaaccagctgaaccaagagcggctgcagtaacatgcatcaagcccgcaaaagcagcagctacacctgaaccaattaaggcacagaagaatgggaatttatacttcaagttaacaccgaaaagtgctggttcagtaataccaagaagtgctgaaacacctgatgaactagccaagcccttcatcttcttgttcttagttaagaagtaaacagcgaaagttgcggcaccttgagctacgttagccatacatgcggtaacaaagataaagtcaccagagctggctggattcttagcaaaggctgctaaaagctgagtttcaaccgctggaaaactttgatgaagcccagtagtaacaatagctgaataggtaagaccaaagacacccatcccaaaggcaccagtagtgtcatatagccaaacgatagcattggtaataccatctgatacgcctttgaagactggcccaataattgtaaaagtcaaaaagccagtaatcataattgaaagaagtggcgtaaaggtaaagtcaacagctgatggcaagtgcttgtggaagtacttttccaaaattgacaatacccaaacagctactaaaactggaataacctggtattgatagttagtttgcgcaacatgcaagccaaaaatgtcccagaagtgatttgcaccaaggagtccaggtgtcgtcataatcattccgattgtagcacccaagaattggttagcaccgaaccgtttagctgccgacattccgactagaattggcataaaaataaacggagctgctgacataacttgaatcatacttgaaataccagcaacattcggtaccatctgaacaactgactttggtccaaacagacctggtgaagtcaagaagttgttcaaagccatcaacaaaccaccagcaactaaggctggaatgattggaacaaagatgtcagacaaaagtttaatgaaatccattactggattcttctttttaccttctgcagcaaccttcttcaaatcatcggttgataattctttcaaaccagtgattttaatgaactcatcgtaaacgtcattaacatctcctggcccaataattacttgatattgaccattggttttaaaagtacccttaacatctggatcattatccaatgctttttggtcgacttttgaatcatcttttaatactaaacgcagacgagtagcacagtgggcaccggcaataatattgtcacggccgacgtctttaattactcgttcagccacttttctgtggtccatattgatccctcctatgtaaacgttttattctcaattcactaattatgataacgcattcaaaaaatatgtcaatcgtttgacatgaaattctttatttattttattacttatgaattaataattattttttctgttaaacgtttgacatatttttcatactaacttaaaatacatgtaaaaagacaacgctttcatggaggtatatttatggaatggacaagagaaaaacgttacttaccttatcaagattgggacgctgatacattaatgcatttgcaagcacaagccgcaaactccccttaccaaatgcgctatcatttgcatcctatttctggcttaattaatgaccctaatggattttcctactttgatggtgcttaccacctcttctatcaatcatatccattcggcgcagttcacggtctaaagtcatggtggcacttcaaatcaactgacatggttcactgggaaaacttaggcttaggtattgaaccagacacaatggctgattcacatggagcttattctggctctgctcgcgaaatcgatggtaagcttttcatcatgtataccggtaaccaccgcgatgaaaattgggtacgtactccttatcaaatcggtgcttggatggataaaaataataaagtttcagacaaaaccatcctatttaagaatccagatcacatcaccgaacattttcgcgatccccaaattatcaaagaaaatgacacttactacgcaattttaggtgcccaagataaaaaggaaaaacacggtcacattgacgtttggaagtctcaggatctaaagaactgggaagaattgggcttcttagactttaccaacgaagacatgggctacatgatcgagtgtcccaacatcgtccgtgttgatggcaaagtcgtggtcattttctgtcctcagggtttagacaaaaaagtagcagcttatgatgacatttacccaaatatgtacgttattgctgatgatattgactgggaaaatcataagttaattaatccaggtaaattacacaatttggatcacgggttcgatgtttatgccactcaggcctttaacgccccagatggtaatgcctacgaagtcagttgggttggcttgcctgacactacttaccctactgatgatgaaaactgggctaactgcttgagtcaagtgaaggaactccacctaaagagtgacaagttaattcaaacgccagttaaggcaataagcagtatccgcaaaaacgaagcaagcatatctaatcaagtagtcagcgatcaagccggccaacaatttgaacttgaattaacaattaaggctaaccaaagtggcactttacatttagctgcaaataatgacttaagtaacagtttacagctcaatttcgataccaaaaatggtaaattagtattagatcgtgctcatgctgggcaaaaagtagcagttgattatggcgaaagtcgagctattacgctttcaccaaatcatgacctcaagcttgatatctttgttgatcattcattaattgaagtattcgttaatgatggtgaaaaggtattgactggacgctactttgccgatcagaccaacaaaaaaattgcgtttgctcaagacattgactacactggcaagctttggcaaatgcaaacaattctttaaacatcaggtgatactatggcagcaaaattaagcgacgttgccaaaaaagccggttgctctgtaactaccgtttcgcgagtaatcaacaaccatggctatttaagtcaaaaaactaaagataaagtttttgccgcaatgcgggaattaaattatcgtcccaattctattgcccgctcattacaaggaaagaaaatgaaattagtcggtttgatttttcctgagatcactaatcctttttttgcggaattagtacaggatatcgaaaccactttattccaacaaaactataaagtaatcctatgcaatgcaggacaaaacaaagaaaaagaacgcgaatatctgcgcatgcttcaggctaatcaagttgatggcatcatcgctggtgcgcacaatctaggtatcaatgaataccaacaactaggtttgccaattgtctctttcgaccgaaagctatctgataatgttccaattgttagttgtgataattatcaaggcatcaagttggcagtacatgacttggttcaagctggttgtcacaaaatttactttctgggcaatgaacacagaaaaggtaatccgactgacgaacgactagcagcttatcttgatgaagcaaaggaatgtcacttttcagcccacattcgttcagttgctttttctgattcttccaacattaaaaatatgaaaattcatgatatgttagtcaatgatcagcctgatggcgtcgtctgcacagatgatttaactgcagtgttagttttacaagaagcaaaaaaattaggcattaaagtgcctaaggaattaaaagtgattggttttgacggaacaaagcaaattcaaacttaccattcggaactatccacaattgctcagccaattcatgatattgcaactttattggttaagttattgcttacccgaatttccaatcccgacgaaaaattgcgccaaaagaattatattttgcctgtcaaattaatcaaaagtgaaacaactgcatgaaaaaaagccgaaaatcggcttttttctacccaaagtcaagtattatcaatgatttaagaaaataaatttacttgttttaatgatgcgaataaggttaaagcaaataagagtttaaatttaagaaaaagcgaaagtaccacaaataagcctatgaatacttgtagtttttccataggttgcttatacttaagttgattatttgatttcagctaaagtcttttattttcggtggctatgttgtaatcatataattgatcatgtttgataagagcaaacattgtgcgtatcagtttatggactgatgcaatggcgattttcttatagccttgtctatttgaagatcgttttttcttgtcataataatcagttatatggcaaggctgcgtagcctttaccgtctccatttgagtaataactcgataaagtatttttctggcaatatgattgccatgcttggtaatgccaagagaactgtctttttcaccagattggtaccttcctggatcaatgccaacaaacgcatcaatttgagctgaagtgctaaaccgtcttagatcaccgagctctgctactaatctcactgctgtaattctagcaacccctgggatactcaaatagatggataaagcacgagcgtttactgctttagccagcttttccatgtagttaattacatagtcgcgttcttgctggagtgaaaataaattagaaatgttcctttgaatagctctaacgataatactatctttggaatcataaggataagcttctctagcaaaagcgtataatcttgtggttaagtaccgtgccctttgttgtcctattccagaaatagaattaagcatttgagttacctgtgtctcattcttttctagaacatatccagcatgtgggaaaagactaacaagcgcccaataaattctgccagatggatgagacagtatttcttcaatttgtgggaaagtggattggaggttgcggtgcaattgatttttagtagtaactatactcctagtaagttcttcataatagcgactggcattctgaagttcatgatactctctgggctgtggatcacgcagcttttgcggggcattaaattgaattaaagccaggcgataagcatctaccttatcagttttattatggcgtaaattattgtccattagctttttcgctttaagcggattaagcttcaaatacttaatatgataatcctctaagaaagcttgcaggcttagagaataaacaccagtagcttcgaaaacaactaaaggagttatcaaatattggttcagttgctcataaagtttttgatagccaaaggaatcattagagattctaaaagattcgccttgtttgatccggtcattaaccacacaaactgtggaagatttactgctaacatcaataccgaaaataatttgtgattccataatataacctccgctgtgaagataaacctctttatcaacctattaattctaattttctaaacacggcatctaagtgcccacagacttcgaagagacttaagaataggtggtaaagcagtccgtttcttttacgacatcaagtgtctaaaaagctgaagacttgatttgctttatcttcactttctattttagacaaaataaaaagtgccagatcgtgaatccgtcgattcatgatccaacactaggttagtatgtttcttttactcaaatttagttttctttgtcactatctaagaaatagatcaacgtttgcaattcggttgctaagtctacattttgtactcgcacatcagctggagctgataaacgaatcggagtaaagttcataattccctttacacccgcatcaaccatttcatctgtggttttctgagcagctgttgaaggaactgtcaaaattgcaattgtaatctgttgatcacttagttgttgctttaagtcgtccatgtcataaacagggacaccacttaagatacgaccagtaatctccttattgatatcaaaagcacaggaaattcgaatattattactgcgcttaaagttgtaattaagcagcgcccgtcccagattacctacacctattaaagcaacattagttaaagtatcttgattcaaaattttcttgaagaagctcaataaattctttacatcatatccatagccacgttttcccaacgcaccaaaatatgaaaagtctcttctaattgaagcactatctacttgaactgcctctgacagctcagttgaagaaaccttatctttgccttcttcatttaaaataatcaaataacggtaatataatggtaatctttttgccgttgcttttgggatttttattttttccatataggaaccctccaaacttaaatgtttgtgaatgtacaatcaagcactactatcatacctgctatgatagtacttatgcaagtatctttttcacaaatcatcattttttcacatatttaacttaaaaacaaacaatttgcgctatatggtagaatagtggttaggtgaaaaattatgattattgcacaaggacacgatttagaacaacaatttggggccaacacattattcaaaaatgttaatttttcaatcgattccaatgccagaatcggcttagttggtcctaacggggttggtaagactaccctgttaaaaataatgacaggtgagcaagaaccaactcacggcgaatttacagttaataaaggcattgatgttggttatatcgctcaggaaaatgcattagatgaaaataaaaccatttgggatgaaatggaaaccgttttcgctcctttaataagggaaagaaaaagcttagtccaactacaagaaaaaattgcagatcatcctgaagatcaagaattgcttaagcaatacgatcaaaagcaattcaactttgaacaaaaaggcggttatacttatcaatctgatattaaaagtatcttgaatggctttaagtttcctgaagacacttggcaaaagaagattggtagtttatccggtggtgaaaaaacacggttagcttttgttaagttgcttttgcgcaaacctgctctgttgttattggacgagccaactaactacttagatttagataccctagattggttggaaggatttttaaagaattacagtggtgcaatcctcgtggtttcccacgaccaatatttcttagatcatttagcagcccaaatttttgaactagaatttggtaaattaactgcttttaagggcaactattcagcctatgtcatgcagcgcgagcaacgtgataaggaccaagaagccgcttatgaaaagcaacaagctgaaatcaaaaaagatgaagaatttatccaaaaaaacttggttcgagcaactaccactaagcgtgcacaaagtcggcgtaaaaaactagaaaaaattgagcggattactccacctaaacataaaaataaggtacggattcatttttcaagcgatcatccttctggcaaggaagtattaattttcaacgatttgacgattggttatcccgataaaaccatggttaaagatatttccttccagattaataaaggagatcgcgtcgcgatcattggaccaaatggaatcggtaaatctaccctgcttaagactattatgaagcaattaacgcccaagagtggctcaattaagtatggcgcatcccttgagattggttattacgaccaagaattacaaagactagatccatctaaaactgtattggatactgttggggatcgtcataagaccatgcctgaacgcgatgtacggtcaatcttagccagctttttattcacagctaaagacattgataagaccgtaggtcaactatctggtggacaaaaagcacggttaactttaactgttttatcacttgaacatgataacttcttactgatggatgaaccaactaaccacttagatatcgaagcaaaagaagtactagaaaaagctttaaaagactttgatggtaccctgctctttgtttcccacgaccgttactttatcaatcaactagctaataagattgttttagttcgcgatgggcatgctaaagtctacgatggcaattattcttattatcttgatgagaaggcaaaacaagcagctatggctgaaaatagtgccgctgagacagaagtcgagccaagcaaacaaattagccagcaaaaacttgcttaccaagagcaaaagcaacgtgattctcaaaagagaaagttgcagcgtgcaattgataatgcagaaaaacaaattgaacagcttgaagaacgagagcaagaaatccaaaccgaaatggccaatccagaaattgcttcaagctttgataaattggggccactgcaagaacagctttctgatgtacaacagaaattagatgaagcaaattctgcctgggaaaaggcaatcgaagaaatggacaattttgaataaaagtataataagtaagttctaatatattaggacttgcttatttttatatgcgcatattaaaataacgtaccttattattcaattgtgcctgtatatacaattcaagaggtgtatcttggttttgaaatgcataaacataagcatttggggattttttgaaagaattttttttcgtgacacaagatgtatcacttactggtgctgcacttttaatcgatgctttacaagcaaacggtttaaacaacatgcatggtggtgtcggcattccagttactgactttgcccgtttagctgaattaaagggtatgaagttttatgaatttagaagagaagatgcagctgtagacgcagccgctgctgctggttttcttaccggcaagcctggtgtagccttaacagtttctgctcctggtttcttaaatggtttaactgctttagcagaagccactaagaattgcttcccaatgattatgatctcaggttcatcagatcgtcatatcatcgacctcgaccgtggagactatgaaggacttgatcaatacaatgttgctaaacctttatgtaaagcagcttatcgtgttgaccgtgctgaagacatgggcttagcagttgctcgtgccgttagaactgctatgagcggtcggcctggtggtgtttaccttgaccttcctgctgcaacagttgccgacacagttgcacaaaagtcagacgctcatatctatgaagtagtcgatccagctccaaagcaattgccatcagatgatgcaattgaccgtgctgttgaattattaaagaacgctaaacaccctgctattatcctaggtaagggctcagcttatgctagaagtgaagcagaagtcagagaattagttactaagactggtattccatttttgccgatgtcaatggctaaaggcgttgtaccagatgactcaccatcatcagctgcttcagctcgttcatttactttaggtcaagccgatgtagtcttattaatcggtgctcggcttaattggatgctttcaaatggtgaggctccattgtttaatgaagacgctaagtttgttcaagtcgatattgacgcaacagaatttgattcaaacagaaagatcgatgccccattacaaggtgacattacttctgttttacaaaaattaaacgcaccccttgaaaaagctaacgttaaggcccctcaagactggctagattcaattaagaatgcctgtgaagctaacaatgaaaaatttgctaaaagaatcgctgattctgaagctaagccaactttaggcttctacagtgcaattgaacctatcaataacttgatgcaaaagcaccctgacacttacatcgtaagtgagggtgccaacactttggacattggtcgtaacttaatcggtatgcaaaagcctcgtcaccgtcttgatactggtacttggggcgtaatgggtgtcggcctaggttatgccattgctgcagctgttgaaactggtaagaaagtcatctcacttcatggtgactcagcctttggtttggacggaatggaaatggaaattatctgccgttaccacttacctgttaccgttgtcatcattaacaatggtggtatctacaatggtgaccgtaacccagttaaagaccaattaggacctactgttttaagccacaatgctcactatgctgaaatcgctaaggcctttggtggtgacagctaccgtgtaagtaactacgctgaaatgaaggatgctcttgaaaaggcctacgaatcaggtaatccttcaattattgatgctcaaattcctgaatcaatgggtaaggaatctggtcacattggtaacttaaacccagaattagatttagcacaacttgaagataaggacaattaatcacgactgaagaaaatgaatatgcacctttaaaaggtattaaagttgttgactggacacaagttcaataaggtccatcatgtactcaacttttagcatggcttggtgctgaagttattaagattgaacgtactaacactggggaccctactagaaatgaattacttgatattcaagattcatggagtctttactacttgcaattgaacgccaacaagaagtctttgactttgaacatcaagactgatgaaggtaaaaagattatgtacgacttggctaagaaggctgatgtctttgttgaaaacattgcaccaggttcagctgatcgtaacggttttggttgggaaaagcttcacgctttgaacccaagattgatctatgcatcattgaagggcttcaatgaagattcacgttttgaaaacgttaaggcctttgaaccagttgctcaatctgctggtggtgctgcttctgctactggttggaacgaaggcaaagccaacgttcctactcaatcagctgctactttaggtgactcaaacccagggatgcaccttactattggtatcttagctgcccttcttcaacgtgaacacaccagtgaaggtatttttgtttaccagtcaatgcaagacgctgtattgaacctctgccgtatcaagttgcgtaaccaaatcatgttagacaacttaggtgcccttcctcactacgctgtttaccctaactggaaatggggcaaggcaattcctcgtgctgagaacactgaaggtggccaagttatcggtcggacttacaaggctaaaggttgggaaactaatcctcgctttgatggctggcacaaccgtcaattacacaaggaagaaatttacccattaattgaaagctacactaagcaatacgacaagtatgaattaactaagaagcttggtgctgctggtattcctgtaggtccagttcttgactggcacgaaattgaaaatggcccggacttgaacaaggatggtactatcgtaaccatcgaccaaggtggtaaccgtggtaagttcaagactattggtttgccattctcactttctaactacaagcgtgctccagatcttggtgaaaacaacaaggaaattttagcttcacttggttatgatccagatcaaatcgaaaaattgactgaagaaggcgtaatttctaaggctcaaggtcctaagaatccacgtactgaagttatcaagggtgaataattaatttattctcatcaaaaagctgttcacttcgaacagctttttctttttaaaatagaaagcgcacaactatgacagaacctaattatgctgagctagaagcaaaaaacagtcatttagataaaaacaaaccttatcctttaagcgggatgctcgttattgactttacccacgtcctctcaggccctacttgtaccagaatgctcgcagatagtggtgcccgggtaattcatatcgaaagaaaaacaggcgatgacacgcgtcacatggggccatatatcgcagatggttctagcgaatactttagaatttgtaacgcaggcaaggaatcaatgtaagcgtcatataaccgagtatcttttttagtccgtatttttcaggtattctaatctcatcaatttaatggaggttaagaatatgatcgaaaaacaacaacccattgtggcacttggccgttcttctaaacctaagaaggctcgtccaccacgcaataatctgttgcttagtttaaagaagaatgacttagagctgaatttttacagcagcttagaccctgaaattatgaataagctgcttgagaaagtcttgccatgattaagctcagtgacttagggcaagtctatatcgtttgcggcaagacggatctgcgtaaaggcattgatggactagcaactttagtcaaagaacagtttgaacttgatccttttagcggcaaagtcttcctcttttgcggcggaagcaaggaccgcttcaaagccctttattgggacggacaaggtttttggctgctctacaaaagatttgaaaatggaaaattgaactggcccaggaatcaaaatgaagttcaagctttatcttctgagcaggtcgactggctaatgaagggcttcgcaatcaatccaaaaataaagaacacgaaagcgtgcgaattctactaacacttgacatcgcacgcttttttgatattcttttaactaataaatttaggaggaagtttaactcatgtcacaagaaaatttggaaaagattattgcacaacaagcaactactattcaaaacttaactgatgaaattaagctcctccgtgaacaagtagcttacttaacgcaaaaacgttatggcaaatcttcagaacaaatgcctttaaatggacaaacaagtctctttgatgaacctgatgctcaagatgacggagaacgtccccgacgccgccgttcagactattacttataaaagacaagctcacaaacgaaagcgtgctgacttactagctgcccttccagctgaagaggttcaccatgaattaggcgacaagcattgtcctgattgtcatcatgaactgattgagataggcaagcagtcagttcgccaagaattattgtttatcccagctcaacttaaaaggttagaccatatccaacatgcttacaaatgtaaatattgcagtcaaagaaatcttagcgacaagatcattaaagctgcagtacctaaagctccccctaaaccatggtctaggttcagcttcactcatcgctcattcactttatcaaaaatatgaaatgaaggtgccggactatcgtcaagaaagcgactggaagaagatgggactagaagtttcaagacagatgttaaattattgggatttgaaaagcagtcaatactactttaaaccagtgtatgatctgcttaagcaaaagctgttaatgcggccaattttacatgccgatgaaacttattatacagtcttagaaagtaaaacaatcaagacttactattgggtcttcctttcaggcaaacatgatcaatacgggattacactctatcatcatgatccttcccggagttgcaaggttgccttaaactttttaggaaactatcccggttatttgcactgtgatatgtggcaggcttatgagcaattgccgaaagcaactttagttggctgctgggctcatgttagaagaaagtttcacgaagccgtaccacaacaggcttctgaaaagtcccttgcccaaaaaggactcaactactgcaatcgcatgttttacttagaacaaacctgggagaatttgagcaaacaagaacgttaccagctaagacaagcaaagctcaagcctctgatgcaagagttcttcaactggtgtgagaaaaataaaatcaccgttttgccaggctctaaattgggaagagccattaattataccctcaagcatcaagctacttttgagcatgtcttgcttgatggcaatttagaattatctaacaataaggctgaacgcgctgtaaaatcactcgtcatgggccggaagaattggttattttctcaaagttttgagggtgctactgcaagtggctttattctaagcttaattgaaactgccaagagaaatggccttgatcctgaaaagtacttgaattatttgcttcagaaattaccgaatgaagagattctggattcggaaacccttgaagcttatttaccgtggcaagagaagatccagataaattgtaaataaaagaacttaaataaccgtctcagtataacagtaactgggacggtttttaagtacactattttatttgacgcttacgaatcaatcgccttagatttaaaagatcctaaggaccatgccttagtagaaaaaaatacctagaaataatcgttctaggtatttgatttaaaaagttattctatttaattcaacatgctcttagcatatggcaattcaagtgatggatcagcattcaaagtcaaatccgcaaattgaccattattataaagattatacgcagcagccccaatcattgcagcattatcaccacacaacttaatatctggcaaaatcaccttaggttggtctgctttaggcaacttagcaatttctgcactcatgcgatcacgtaagccatggttggcagctaccccaccacccatgataaaggtcttgggcttatattgcttaattgcgcgaattgttttatgagccaaaacatcaattactgctgcttgaaaacttgcagccagatcatacttattcaacttttcatgaatctgatcagcatgatgacaagtgttaataaaagctgactttaaacctgagaatgagaagtcatagtcatcatcttccatcattgctcgtgggaagttaaaggtatccttgccttcatgagcccaggcatcgatagttttacctgctggatagtttaccccaagaacacgaccaatcttatcgtatgcttcgccagtagcatcatcgcgcgtatcaccgataatttcaaaatgaacaggatccttaagtaaaactatttcagtatgtccacctgaaacctgtaatgcaagagctggatattcaatctcatcttttagttgagctgccataatgtgccccataatatgatcaacaccaatcaaaggaatacccgttgccattgaagcagccttagctgcacttacaccaattaaaagagcaccaactaagccagggccataagtcacagcaattgcatcgatatctttccaagtacaattagcttcagccaaagcttctttagtaatctgactaaccacttcaatatgatgacgactagcaacttcagggactacaccaccaaagcgttgatgactcttaatctgcgttgctacgattaagctttcaatctcacgcccatttttaatgacagcagtggaagtttcatcacaagaactctcataagctaaaatgcgaacatttttttcactcaaaacgtaaacttctttcttttaatctgatgtggttttaaccataaaaccatgttcatagcatcggtatgagtatcatggtaatagtttttacgaatgaaggtaccttcaaaacctaaggaacgatatagcttttgggcaatctcattatctactcttacctctagactaacgcaatcactgtcattttcacgcgcccgatcaataatcaattgcattaagtaacgaccaatatgcatattttgaaaagccggcgctactgcaatattagtaatatgcgtctcttctggagtaaaacgcgcaccaataaatgcaactagcatcgattcataatacactaccaaataaagacaattatgccgcttctctagttctcgctcaaatgaaaacttattccacggtgtccgacctgaataaacttgctcctctaatacaagcaggtcaggaatattgtcatctgtagcttgcataatttgtagtctcttaccgtttacattcgcaataaacggggtaaaactcatatcaatccgatttaactgttgatggaaaaattgattaaacttcttcaacataatgactatctggctcgaatggtttgcctgtctttttatgccagtctacttcagcctgagttcgacgcaagtaacgtggcaataatttatctggatcaactggaaccgcattttcagctaattgtccaattagcccagcatggatgacattctcttcttcagttccataaacatatggaatattcaaagctttaaatttttcatcttgcttttcaagacctgagcccacaaaaacaattttcttaacttcatgcttggccgcataatcttgaatcgccttaattaaaacgtcgatattgtaatgaccgtctggaatgacattctctggtacagcaccgcttaaataaccggccgcaaaataattgtcatttcttgcatctaaaccagtaattaccaaagcgtcttcttgaacgcctttagccaaagcttgtaaagttgagattcctacaacctctttatctaaaatgctggcaaacatcttaacagtagtgattccaattcttagtccagtataagaacctggcccaatagcaactgcaaaacgatcaatatcttttaagcttaaatcattatcttttaagatttcatcaatccaaggatcaagatgttcgctatgattacgctcatctcgttcatttttctcaacaataatttgttgaccatcattcaaggccacgctcaaatgattagtagctgtcgaaacacttaaaattttcattttatacatttttctcttttcgctttaaatcacttttttattttaacacgagaaacggcttgtaaaacaaagtagctgataaccatttgaatccaaggaacgatcatctccttaggtaaacgttggatcaaagccgcattgaaattgataccatacataatatgtagccataaggtattcatgccaatattgacaattacagtcaccagaatagtagaagcaataatccgccaaattttaactggcttattatataaaaacagggcgtagataaatgggcctgccattgctgttaaagtaaaaccaatgaaaaagccaccttgatcgccaaaaagtgcagatgaaattaaatcactaattccaccgccaattgttccccagagcggaccaaagagatatcctaatagcacactcccaatgaaacccagtcccactttaaccattactggaccaaaagaaaactgacttagaataattttcattgcaacaacaatacctaaaaagactagttgctgtaaatccgttcgtaaaattttctttgtattcatttgaccgattcctcccctaaataaaaacaactaatagcgtcatgttgttactatatctcacgccaacttaattcacagacggccttaactgtcccatcttctgcttcaattgcatgagatgtaataataatatcatattgaaccaagtccatgcaagaatttatactctcaccataatgaacttctttatcaaatttaatatcaattgctgtaacaatatgttcttttaaaaagttacgatccaacatatcaacaaaccaactgaaataatgactattagttacatgatgattagtatctaagtcatcgtaacgcgcacggtatgaacgcttttgctcgtattcggtttgcggacgcaatcttggaaaacgtggcatctttttaagtagtggtgcaccccaatcttccatcattttagtatcggttggcaccatatgccgcttcttcaagtcgagcattacccactggctttttacagtcactaatggcttaccgtcttgcgtactaacgccaaaatcacgatactcaaaaaaacgattatagccgctagcttcagtacttagaataacttgatcacccggtttaggcaggtctttaatctcaaaatgatattgagtaacgacccagcctagaccacgcttaaccaagtcatcagtcccagcaccaccttgacttaattgatgctcagaaacctgcatcattaactcaactagtgctggtaattttaaacgccgattttcgtcacaatctttaaattcaatttgatattcttcggtatacttcataattaatcctggtgatattgatcatacaattcattcttagaaacatgatgctgcttggctacctgtttaattgcatctttcttggattcacctttttcaaccaagtcattaactaagtcaattaattctgtccaagatagttgctgaggcgcttctgtattaggtgaaactagaatcacaaattccccgcgtggagcattctcattgaagtaattcgtaacttcttccacactaccccggataaactcttcgtggattttggtcagttcacgtgcagctacaatttgacgatcttttggcagcacactagccaatgttttgaggttttttgctagacgatgcggggcttcataaaaaattgatgttgctctattatcgcgcatctgtgcaaaataggtcttctgttccgatgattttcttggtaaaaagccataataagtaaatggctgattaaaaccggaagcaatcaaagcagttgaaaaagcatttggaccaggaagtggtacaaccggaatatcatgcttaatgcattcttgtactaatacataacctgggtcagaaatcacgggcatccccgcgtcactaatctcggcaatcacagcaccttccttcatcaacttgatcaattccggcgcccgctccttggaattatacttatgaaaagagatcattttattatgaaccccaattttttccagtaaaatcccactagttcttgtatcttctgcggctacataatctgcatcggttaaaacttttttagcgcgaatagtaatatcttccaagttaccaatcggagttggcactaaataaagctttccttcatcttttgcataactgctttgacgtttcattatctaccgtcctttttcttgccctttttttcgccaaaattgtccaaaatatcaagacaaaacatacaatctgcacttggatcacgatgcgagccatagtacatattgcaaatgtggtaccctgaatcataaatcttcttcaatgattccaagccactctgcgttttagtctcaggtgcaggctgatttgccgttaacttgtccagcttctcatggagtaattgattttctaccttcaactccgtgttttcttttaatgtttctaaaatatcattttccaagctggcaatcgtcttggtcatattttctgttgtttcttcaatctttttcagttttgaatatggatccaatctaaacacctacttccattttaaggcgagataatctaacgcattttgtaaatttacgttactcaaacgcattttgtctatttcaattaaattcttaagcattgtcgccgccattattcttttagcaggattacgcaaatcttgctcggccaataattttaactgaagcaagatgtaaccctgctctgacactagcttagcatcagcagctagcttatgtgcactgacaagtgctaagctgttgtgttccagcatttcttgataaaaatatttaattgcctgattccatttatcaagattacccagttcctcaatctctgcttttgaaaaaccattctccagtaagactgcagtcctaccactagccctctcaccattgtcaaaattaatgatctgggtccgtgaacgcaccgttggtaaaatctgatcactattgttagtaatcaaaatcgtaactactggcgctactggttcttctagtaagtttaataaaccgtttgctgcagctaaagttaacttttgtgcttcattaataaagaagaaacggcgagtactttcaactgggcttttggctaattcttcttttaagggacgaatttgatcaatccctagagcctgttttccatcaggcgctactagcaatacatctgggtggttacctgacaaaatttgccgacaattttgacagctgccatccggcttattttcgccagtacaattaaacaaacaagctagccagtatgcagtattcaatgcccgtgcctcatcgctatcaacaaaaagataactatgagctaactttttttggtcatatgctctttttaaaaattgggtttgctttttcccaacattactaagatcaatcatcagaagcgtttaaactcatcaactggaacaacaaaacaagttgcaccaccgactgtcactttcaaaggctgtgtaatttcatacccagttgaaaccatatgtggtgttgcaatttcctctcttgctcgggactgttccttaataatctttaatacatcgtctactttatcgtcatcacaacctactaaaaaggtagtatttccttgacttaaaaaaccacctgaagttgctaacttagtagcacgaaaatcattttgaacaaaggcccgttgtaaatcattagagtcttctttttgcacaattgcaattactaacttcatctaaatcaatccttaaaataactctggcattctttgctttaatgttgcaataacttgagcaactacctgatcaattggctgcgtagcatcaacagttacgaagcgttcaggatacgtctcttttaccttgagaaaaccggcataaacctttttatgaaaggcaagattctcttgttccaaacgatcttcctgacccggacgcagcttttcaattcgttttaaccctacttcaggatcaagatctaagaaaaaagtaagatcaggatctaatttatccgttgcaaaatcattaatttgcttaacttcctgaattcctaaatcacgtcccgctccttgataagctaaagaactatcgacatagcgatctgaaaatacgactttgccttcctttaaagctggacgaataatctcctccacatgctgactacgtgatgcagcatataaaagcgcttcggtcttattgtccatcttgtcgttagcaggatctaaaataatgtcgcgaattttttctgcaatttttgaaccgcctggttcacgcgtcacaagatattgtgtcttaagctctgaaccaatttggttcaatacttcttttaaaactgtacttttcccggcgccatcagggccttcaaaactaacaaaataacctctcataaaatcctccatatgtctattctacagaagtttcatagagattaacagtcctactattttttatttattcaaaataaaaaaagaccaatattcggtctttttctactgggtaatagcattagtaataccactaaatcttgtgcctcgatgacgagcttcattatacaaaaaagtatactttgcctttaagattcgattttgcacataattatcttcggataaatctaaagttgtttgatcgagatcttgctctaatgcaatttgattttgtagcttttcaatctcggctaccaacttttgatcacccattgctttgatctttgcttgctttttattagccattataatgccgttcttccttgcactgcgcgctttaaagtaatggaattagcatattcaatgtcactaccaactgacaaaccagcggccaatctggttaccttaataccagctggcttaattaatttgctgatatacatcgcagttgattcgccttctggagttgaattaagcgccaaaatcacttctttaacagcatcatttttttgcaaacgcgtaattaaagacttgatattgatctcttctggtccaattccatccattggtgaaagaacaccatgaagcacgtgataaagtccgtcatattcgcccatttcctcaaaagccatcaaatcctttggttgttcaactaccataatagttgtttgatcgcgattaggattagagcaaatatcacagacatctttttcggtaatattgccacagatcggacattgatgaatgtctttttttacttgaactaaagacttagcaaaatcatcgacatcctgatcaggcatatccatcgtataaaaagccaaccgagtcgccgttttttcaccgattccaggtagcttcatataagcatcaattaaatgagcaattggtaatggatattgcaattacatcaaacctttcgtgtatttacctaagcttgcctgagttgcctcatcaattttggtcaagcccttgttaaccgcatcaattaccaaatcttgtaacatatctgggtcgtctggatcaattgcttccttatcaatcttgatgtccttcaacttgcggtcaccagtaaaggtagctactactaaatcatcggcagacttaccagtaaattcttgagcagtaatgttttcctgctcttctgccatttgtgcttgcaacttcttagcttgcttcatcatttgttgcatgttcatgccgcccatgcccataccaccaaaattaggtcttctactcataatttttctcctttattattctattatactaataatctgcttatcaaaattgtcgtctttctctagtttaacttgtttatcatcaaaattaaactcagcagtatgcttatgcggtatcttcaccttattagttacgcccattttcatccattcatattctgaatcgatgtgccctatatcaatcatttgattattaagctgagctatcaaatcagccacaatcacttttgcagtaggacctaacatcagtaaaatcaacctattagctgcatttttaataatttcatcttcaataacttttttgcgactatatgcattagttggcggacaaatgagtctactaattgatctagcattagaaaacaagtcatgccttcgcctgagcgactatatttaccttctacaattaaaagatcatgatcctgccaaagctgtttcattttagcaaaataatctttagcgtgacttttatctactaaatcaatatatggccgtgaaaagaaagtagaaacgtatacattgtattgcaattcaacttctcttaacaagtcatgattattcgggaagaaactattttgataaaaattacggcaataatcattatagcgatctaacttttcaaaaacatcagataatcctactaataaacggcgattgctgccttctaacaggagctcttttagcgaaccagctaattccggttgataatcttgatacggaatacttgctcctctaattaaatctaattctccatctccaaaacgaatcaaagaattatgatcttctagtaagatctgtaatgttgtttctttatttaaaactttaatattataatcattgctcatagtactttagtctttaatattgactgcatccccaaaaagatcctttgccttattaatcacttctggatcaacttctggttcatctgactttttttcttgaatctcaatctgttgctttttcttagcaagtagctcatccttatggctttcaacaaattcttttctaactgccagccaatcgttatctggcaccaaaacaatgccgtaagaatgtttagcaaacttttcaatatagtctgttaagcgccctaacagatcattatctgcgctcgcattttcaaaccataaagtatatttgcatttcatgacaacttgtttaggactagcagccactggttctaatacatcaagcagtgctttttcagagacagctaaaacagattgtaaatcaggccagacattcttaattgtctctaaatcgtttcgagtagcattttcaagaacatgatatacttgtttgcgattttctgccgtagtttttttgacttttctaaccggctttttagtttgcttctcttttggtttaacagcaggcttaggagccactttaggtaccgcagtatccaagtgaaatacctgatttgttgataaacttggcttattggatacttcactaagtttttgtgttaaatcaacgacttgcttcttcagcgctgctagttcagcctgcaaatcagtattaccttgtgcaggttgagctggtgttgtcttagctggggcagcgcttgtctgcactggtgcagtactacttgcttctactaagaacacttccagtggtatctgttgctgattagtatagcgtaaatcattcaaggcattattagccaaattaatcaatcgataataactatctgtagaaacgctctttattttttcaataaagtcttttgttaaaaaagtttcctgtttattttcatcggttttgacgattaataaactcttagtagttagatcgatgatttcatctaaaatgttttttgaactagctcctttagccaactcatcttgtgtaaactgcaaggcttgacctgcatcctgatttaacaaagctaaaagaattttttcaatattttctcgatctgcaaagcctgtaatctgcaaagcatcatcatagttgacgctttccttctcgtaactcaacagttgatccaaaatgctaagagcatcccgcatcccaccatcggctacttgagcaatgactgctaaagctttatcttcatatttaatattttcttgatcaagaatgtatttcattctcttctcaaggtcttctttggaaattcgcttaaaattatagcgctgcgttctagaaataattgtcgcaggcactttttgcaattcagtcgttgctaaaataaatactacatgctctggtggctcttctaatgtcttcagcaaagcattaaaagctcccatcgacaacatatgaacttcgtcgatgatatataccttgtatttaccttccgttggagcatattttaccttatcgcgaatttcacgaatttcatcaaccccattatttgaagcggcatcaatttccatgatatctggcattgaaccttgatcagctgcaatacagttagcacactcattgcatggttcgccatcttgcaaattagtacaattcaatgccttagcaaaaatcttagcacaagatgttttaccagttccgcggggtcctgcgaaaagaaacgcatgggaaaccttaccacgtttaatcgcattttttaaggtatcggtaatcgcttcttgaccaatcacactgtcaaaagtccgcggccgccacttacgatatagcgcttgataagccataaattctctttcctaagtaaaaaagctcctagctctcgaagagctaagagctgttaatattctaacaaaaaaggcacatgcctgaacaaccttagtgctgctaccttccggtcctgacacaattcagaggtcaaacattgcccaacaactatgttaacgtatttcagtaaatattaccagcatcttgttttaaaaattactgattttatacttctttttgagctaatttagctgctttttgtttctcacgaatcgctctgaaaaaatcttttagcatttgtgcacattgatcacgatacagtccacgaattgcatgcggatgatgattaaatttttctacgctaaataaatccacaactgatccacaagctccggcttttggatcaagtgcaccgaaataaacgtcttttattctagaattaataattgcccctgcacacatcgggcatggttccaaagtcacgaataagctgcagtcaattaagcgccacatgcctaacttactgcaagcttctttaatcgcaatcatttctgcatgttgggtagcatcttcatcaagttcacgcctgttatatccagtaccaactacgcggccatcaggatcaacaacaactgcccctatcggcacctctccttgcttttcagcttcttttgcctggtcaatggctaattgcatgtatttccttttatcttcgccagacagcattttatcacttctcaattcatcgtttttatttattgtatcaaaaaagcagctatttgcgactagctgcttactttttacaatggttcaatgttacgatttctaaagttgtggtagaaaaagattcctgacaagatcaagtataatgcagcaattccagctggagcagcagtctcgttatcaccggaaatcatacctaacataaacacaccaacaattacaatcaatactgcaacaatgtatttccaagcctttttcataataattatcctcttcacatactcttgatatttacaagattattatacgaggataaatccagttttgaaagcacttttataaagtctaatgcttatttaatagtactttcaagcattttttatttagttatttcttagttgattttaagatataatagcctttatctcttgttaaaatttcacaattaccatatgtattggtcatcagcttacgcgcactaggttctccctgctttttctgaataactactaataagataccgccattaaccaaatgctcatttgctcccagtaaaatctcattaaccactttttttcctgctctaataggcggatttgttaatattagaccaaactttttatcattatccacatgttcataacaatcagaggaatagatatttacattatctatgtgattaacttgtgcattctgctttgccaagcttaatccacgctcatttacatcaaccatatctacagtttgatcaggccaaaacttagccgcaaataaaccaatcggaccataaccggtaccaacatccaagatattatccttaggaaaaacaacatctttcattgccttgatcaatacgcctgagccataatcaaccctcattttagaaaagacacctgcgtctgttgtgaatttcaaatcaatattatccacatgataatcaacaacatgttgatcatgcttggcagtaggatcagtcgcaaaatacatttgatttttttcttcactcattttaactaacctttctttttctcaaaccattcttttatcttatgcagctccgttgtattctgtacatctttcaattcattaatctgtgcttgcatctttttgttttgatcagccaaatccttgttttgcttttctaaattatcaagctttttcaaaattaattgaatattatcatgcgtttttaacgtattcgcgccattcgttctcctcatcaaatacgaagtaatcgatgacgttaacataccaactattccaattcctaaaagcatcattactaatgtaacgaattttcctacaatactatgcggtggaattgttttgccaaaaattgcatcataaccgacagtagaagctgttgaaatgacccaccaaaaagcagtatccagcgttacatgttcagtgattgcgaatgcttccgctcctaccaacaaaaatgtaattgtaaaaaagattacatagagtaggccattagtatgaaaaatattacgtaattttcccatcaaaccagctaatcgaatcaaacgcaaatgccgcaaatctgataccagcccagataaattaaaaatatttaagctgataaacaataaccccattggaataatactcagcaagtcataaatgtgagttttgaaatatagtttcttgtcttctgctgcatgtaagccacgaaaataatcaattgcaaaatatactacaattgcactattgatccagaaccatttactagtcggttcatcaatattaataaccgcagcaaaatctaaaataatcaaaaaaatcgaaataatagctaaaatggccattacccattgatatggcgttagtcttctttctatatctttcatcataaatttaattatacaaaaaaataagctcttcgcacatagcaaagagcttattcatagttgcccagttgggctgtaactatttaagggttacagtagcaccaacttcttcaagcttagccttgatgtcgttagcttcgtcttctgaaacgccttccttaacgttcttaggagcaccatcaacaaggtcctttgagtccttaaggccaagaccagtaatgtcacgaactgccttaataaccttaaccttttcttgacctgcttcagtcaattcaacgtcgaattctgacttagcagcacctgcgtctgcagcacctgcagcagcaactggagcagcagcagtaacgtcaaattcgtcttcaatagcctttacaaggtcgttcaattcaaggatggtagcacccttcaattcttcaataatcttatcagtatctaaagccatttaagtatcctccgaaaaattagaatttagatattaaatataaatttctttattattcagctgagtcttcatccttagattcagcaacagccttaacagcatatgcaaagtcgcgtacaggagcttgtaatacagaaacaagcattgaaagcaaaccttcgcggcctgggatagcagcaagttccttgatttcatccttagaagtcaacttaccttcaagcataccacccttaatttcgataacgtcaaagtcatcttcgtacttagaaacgatacgtgcaggttcagtaacgtcatcagcgttatcagtgtagataacagcagttggtccaacaaaagtatcatcaagaccttcgataccagccttagcagcagcacgtcttaagtaggtgttcttgataaccttcatcttaacatcgttatcacgaagttccttacgcatgttagtaacttcttcaacagtcaaaccaaggtagttaattaccaagattgccttagcagctttaagttcttcagcaaatgcatcaacgaacttttctttttcagcaatagcagctttactcaaattatttcacctccatgatcacattgataaattctataaggccttaaaaaagcaaaaactccatgccgaaagacatggagcataaaaatcttcatcatcttctggcctcggcgggattttgaggcgtcatgccacccgagtcttaggtagaatttacagttaattattatagcaagctttgctgtaaaatgcaaaagataattttatttattttggttattgatgatttcattaattttatccaccatctcgtcaacttgatcattgccaaaaacagtgtagtttgagtaagtattgttttgatctgctatatccccaaaagacaaaattggaatattacgttccttaacttgatcaattatctgataaactttatcaccgtagttaatgtccaaataagcatctactgtcttgattaagcgtttctgtttttcaccaataattgtttggtataacgccaatacagtttttgaaatattcattaattatacgcgtggtgctagttaaatcgttttagttaataaaagttgtaggtaatttaaatagaaaagagtctgatctaattgaactatctcaagcttaagcgtttttctcaccatttacaagttagttttaatcggttaaatgtgatttgtcgctcgctatataagctttatgcgcctgatggacttaaacatcgtaaaaatgttgatcagaccaagcttcctgatagttctatcttagcgatgctcatttggcaaactgaaattggaattgaatctcaacgaagattctgtaaattcttcgttggcttatctcattctcgttttaaccgtcgagctcgaatgctcttgcctctaattcgttgtatccgtcaggcttggaatcaagaagtaaagacagctggagaatttttgattattgatagtttcccagtgccagtttgccagcctgtttgcaattatcgtgtcaagatctttcggggcgtagctgatattggttataaagcaaccaagaaagtctattattatggcttcaaggtccacgcaatagtaagcgatgatggcaattagaaaaagcattgaaagcgacttttctttgcttagttattacaacgctgagaataatcgagcaagaagtccagtaggctttcaacagcggctagaaatagctattttagcttataatatggcatattgtctagaacgatttaactagcaccacgcgtatcaactgttttttattacaaaaaaagcaccgctttttacggtactttatttaaatcgtttcactttcagttgaattagatagttcttctagttcacccgtagttttataaaccacccagctagccaagttaacaatgtggtcaccgattcgttcaagtaaacgggtaactacaaaatagcttgatgaagccattgcacgcgaaggatcatcttcaattccatcaacgatcaattgacgagctcttacatagtcgtggtcaatcatgctatcacgactagccacttcacgtgccattttttcatcatcttgcacgtaagcagttaaaacttgaattaacatatgtcgcacattatgtgtcatattagaaataatttcttcaacttctggaatacgaggattaccttttactctgattgtttccagagcaatactcatagcattttcaccaattcgctccaagtcagtagtggcctttaaaatactgataacaactctaaaatcagtagctaccggttgctgcaaggccattaattttaaggcttgcttttgaatattaattgattctgtaggaatcttttcttcatcatcaaccattgactgcgcagtctttttatcatgatcaacaaaagcacgggtagcatggtcaatatcatcgttgacgaggacacccatttccataaattgtgtatttaattttttcagttcatccaaaaatatttcgtgcatctttttacctcaaaattttaaccaaaacgaccgttaagataatcacttgtgatttgtttcttaggtgcaataaacatttcttcagttggaccagcttcaatcaaatcgccattcatcaaaaaggcggtctgatcagaaattcgtcctgcttgctgcaaattgtgagtcaccataataaaagtatactgatgctttagttccatcagtgtctcttcaatctcactacttgaaattgggtcaagcgcacttgtgggctcatctaataaaacaactttaggtctaacagccaacgcacgagcaatacaaattctttgctgctgtcctcctgaaaatgcttgagcgtttctagttaaattgtcctttgtttctttccaaatagcagcttgcttaagactctcttctacccgctgatcaattagctctttgtctttaacaccagcaatttttaagccataagccacattgtcatatacggaaaacgggaatggggttggctgttgaaaaaccatgccgacttctttacgtagactgaccaaatccattttagaattatagatatcttggccttcaaacttgatttcacctgtgatattaatgttttcgatgtcatcgttcattcgattaagacagcgtaaaaaagtagatttaccacaaccacttggaccgatcaaagctgttaattcttttttcttaaaatcaagactgatcccgtgcagtgcttcataattgccataacttagatgtacatcttttgctgaaattattgttgtcattttatccaaaacttccctgaatatagttttcagtaatcttacccttaggattagtaaagatctctgccgttgaattatattcaattgcatgtcctaaatggaagaatgcagtataatcactaattcttgaggcttgctgcatgttgtgagttaccataatcatagtatacttactcctcaactgcttaagggtatcttccagtttagaagtagaaacaggatccaaagcgctggcaggttcgtccagtagtaaaatttctggcttaacagctaaagcacgagcaatgcataaacgctgttgttgaccacccgacaatgctaatgcacttttatccagcttatctttaacttcatcccataaagcagccgcacgcaaactttcttctacaactcgatcaagttctgcccgatccttatgtccatctgccttcaaagcataaacaatattttctctaattgatttaggaaatggattaggccgctgaaaaaccatgccaatgttttttcttaattcataaacattgatattaggcttattcacatctaaaccatgaaaccagatttttccgttaacagttgctactcgatcattcattcgatttaatgaacgtaaaaatgttgatttacctgaacccgaagcaccgatcaaagctgtaatcgtgttctttttaaattgaagactggcatcaaataatttttgtaccttaccgccataaagaacacttaaatcttcagttgataattccaaatcatcatttgcaaaagttttaatatagctaggttttaaatcttgcattatttcacctacttagctgcagttaacttgcggtacaatttattgcctaaataacgtgcacctaaattaaatacgattaccacaataaccaagagcgctgaagtagctgctgaaacaatcgtggcatcaggaataattccttcagtatttactttccaaatgtggaccgccaatgtttcggctggccgcattacattaagtggactagttggactaaatggattccagtccgcataattgactgttgatccactttgtcccgctgtatagatcaaagcggcagcttccccgaagattcggcccgcactcaaaataattccagttaaaattccgggaagagcagcgggtaaaacaatcccgcgaatagttttccaattagataatcctaaagccaatcctgcttcacgttgatcttgtgggacgcccttgattgcttcttcaatattgctagttaaaattggcaaattaaaaaaggtcaaagctaaagcaccagaaataattgaaaaaccaaagccaaattgaactacaaacaataaataacccaataagccaactacaattgatggtaatgaactaagaatttgaattgtagttctaatcaaattggtcacccaattatctttagcatattctgctagataaattgctgctcctaaagcaattggtaaggagataatagtagtcaaaattaacaaataaattgaattgaaaagttgatcacgtaccccaccaccagcttggtatgatgaggcttcagaactcaaaaagcgccaggacaaatgtggaatacctgtaatcaagatatcacctaggataccggccaaaattaatacaacaattcctaccaaaatatagataatcgccgtagctaatttatctttcttttttgcatccatattacttttgtcgagactgtaaaatattttgtgtaaggatgaatgattccttaaatttatttctttaaacattagaaaaaggagttcctttctcgtatgattggtttgaacaaaaaaacacatacagaaagaagaactccttcatgaatgattttaccaaagattttgctcaagctctattcaatccagacaaaataaatgatttattgcgcaaagagctacaacaggctgttaataacttgttagaagctgaattgactgcctttctgggctatgatccctatgccagaaatggctggaatactggcaactctagaaatggtgcttatttccgcaaagttgatacgcaatttggcccaattgaagtgcaagtgcctcgggatcgcaacggtcaatttcatcagcacacgctgcctgactacaagcagcactcggatatcttggaaagcatgattatcaagctttactccaagggcgtgaccaccagggaaatagccgatctaattgaaaagatgtatggcagccattacagtccagctcaggtatcaaatatttccaagcagatgattccaaaggttgaggcttaccacaaacgcaagctaagcgacaagtttttctgcgtctatttggatgcgacataccttcctttgcgccgagaaacatttgagcgtgaagcagtctatattgccattggcatcaagcctaatgggcacaaggaggtcattgactactgcattgcacctagcgagaacattgaagtctggacagatatgcttcaaaacatgaaatcccgaggcttaaagcaagttgagctttttctttctgatggtgttgttggcatgaaaacagccttggccaggacttatcctaaagctcattttcaacgctgtttggttcatgtcatgcgcaatatctgcgctaaagtacgcgtcgacgatcgtgaaaagatcatgaacgaattcaaacaggtgcatcaacagacaaacaaagaagaagccacagctgtcctgcatgacttctataccaaatggggcaaggtttacagccatgttatcagaagcttgaaagacatagaaccagatctgctggtcttttataactatcccaagcagatcagagcttcaatttattcgactaacatgattgaatcatttaacaatgtgatcaagcgcaaagctaagcctaaggcagagtttccaactgaacagtcgcttgatgcttttattggcattcaggcaatgagctacaatgaccgttatttcaatcgaattcataaaggctttggtcaggttcaggacaccttagaatcctactttgattaaataaataattaaaaaatcaatttacgagaaagaactatttacacaaaagatttgacagtttccttttgtcccttctttccaattaacttaactaggaaattaaataccaaagacataattaaaagcaataatgctaatgaccataatgcattgtttggcaaagttcccatgaccgtatttcccatttgactagttaattggctagttaatgttgctgatggactgaccaaattgtatggcatcaagacggcattaccgataaccatttgtacggctaaagcttcaccgaaggcccttgccattccgaagattaccgccgtcaaaattctaggcgtagcaactcgcaaaacaacatgataaatagtctgccaatgcgtagaacctaaggccattgaagcttttctaaaatgacttggtacagcctttaagctatcaaccgttaatgatgtgattgttggtaaaaccataacgaacaacaccaacgtagctgctaaaataccaaaacctgttccaccaaatagttttctaatcacaggcacgatgatagttaatcccaagaaaccataaactacagacggaattccaactaataattcagtcactgactgtaagaaattggcaccctttttagatgaatattcagtcatataaagagctattgcaattgcaaacggggtggctaccaatgctgctaaaagagttactaagaacgaagtaacgatcattaccgcagcaccaacatgattcttgccctcacccgggtcccaatcagttgaagtcaaaaagtgaatgacattaacatgatcgctgacaaaagtagccaagccgtgatagccgacaaagccgataattgagacaactaagacaataatcaaaacaattgccaagtaagttaaacccttgccccaatattcttgatgagtctctttagatggcttggttaatttatcaatatcaacactagtcggacccatcttttttaatttaacgtgtggaacgtgttgactagcaattgcttgatcaacaacttcctttaatttatccttcttatccatgaactattttcctatttgtgtaacttgattcttgctattacgagttactttcatttcattgatactgaggtacccaatcttaggtacaagatctttttgtactttttcacctaacatataattaataaacgctttagtttgtttgttgggcttacccttagtgtacatgtgctcataacaccaaatattccacttattagtagtaatatttttgttagttggctttaccccattaatactcaacttttgaatattggtatcatgagcataaggaaaggacaagtaactaatcgtaccaggcgttgaattaacaatctttttaacggcaccgttagagtcctgttcttgcgacttaactggttttgttccttgtaaaattatatcttcgaaagcagatctagtaccacttcccttagaacgattgatcacagttatggcttcatttttgccacctagttgcttccaattcgttaatttaccagtgaagatctgtttcaattgcttttgcgaaacatttttcacacctacacccttattaacaattggaacaataccaactactgcaattttataatcacgaagtttcttggcatcaattcccttttgtgtttcggcaaaaacatcagaggttccaatctggactgcaccagcttgaacctggctcaatcctgtacctgatcctccaccctgcacgacaatgttgctgtcttgatgacttaagcgataatcattacctgcttgttctgctaaaagctgcattgcacttgaaccaacaatagtgattttagaaccattattagcacagcccgtaacaaaagctagcattagcaccaacataatgactagttttccaatagaatgctttttcatgacattatccttaatatatagatttgtaagttcaatttatgataccatgttcgaaaataataggtcaatgaatagaaaaaagcctcgcaatagcgaggcttttaatagtctattttaaattagtccaagtttaatggatcaagcttgatccctgggccaaaggttgctgaaacagcaacactcttaatgtattgacccttagctgaagctggacgagcacgtaagataacgtcgcgtaatgcgtcaaagttttcaactaattggtcttcagtgaatgataccttaccaataggagtgtgaatagctgcttggcggtcaacacggtattcaacttgaccagccttaacattcttaacagccttttcgatatccatggtaacagtaccagtcttagggttaggcattaagcccttaggtccaagaatacgacctaaacgacctaccttagccatcatcattggagtagctactacaacgtcaaagtctaaccagccgccttggatcttttctaccaagtcatctgagccaacaaagtcagcacctgcagccttagcttgatcagcttgtgggccttcagcaaatactacaacggtttgggtcttaccggtaccatttggtaaaacgatagaaccacgaatttgttggtcagcttgcttaggatctacgcttaagttgtaagctacatcaacagtagcatcaaagtttgcgtatgaagtttccttaacaagtttcatagcttctgctactgagtataatttatttgagtctaccttcttggcagcatctaaatatttcttaccatgctttggcatgtgatttcctccttgtatatgtggtcaaacgagcttctcttaactctcccacctaatttgttacctaaataacaggattagtcttcgacttcgatacccatacttctagcggtaccttcaaccatgcgcatagcagcttcaatatcagcagcgttaaggtctttcatcttagtctcggcaatttccttaacttggtccttggttaccttaccaaccttcttggtattaggttcaccagaagccttttggatcttagcagcttgctttaaaagaactggtgctggtggagtcttagtaatgaattcgaatgaacgatcttcatatacagtaataactacagggataatcatgcccttttggtcagcggttctagcattgaagtccttagtaaaaccaacaatgttaataccagcttgacccaatgcaggaccaactggaggtgctggggtagcagcgccagctgggatttgtaacttaactacgttaataactttctttgccacggtcaaaacctccttgattccgtgatgcggttaaaatggagaattttccttttttctcctcccacaataataaacgtaccgtattagaataacatcgtttgggtacaattacaactaaaaattctaaatattattcgttttcgtcaagcttcttaacttgatcataatcaagttcagcagtagtcgcacgaccaaacatgtcaactgatacgtataatttgtacttatctggttgaatatcagtaatcttacctaccatgccattaaatgcaccttcagtaatagttactgattcgccaatatcaaagttaactactggtttcttagcaggttgaccttgattcttaagcaaacgcgttacttcttcatcaagaagtggtgatggcttagagccaccaccgtgtgagccaacgaacccagttacattaggtgtgtttctaacgatgaaccaactttcatcagtcattaccatttcaactaaaacatatcctgggaaaatcttttcttcaatttcttgtttcttgccgcgaacggtttctactttttcttcttctggaaccattacacggaaaatgtagtcttgcatccccatgctttgtgcacgtgacaacaagtctgacttaaccttgtcttcatagcctgaataagtatgcaaaacgtaccatttcttttgtgttgtttcgaccatatttttctccttaaattttaggtaaacaaaaaaacctcccacagaggttttcttttagctgtcaatattatagcatgaatcgctgataatttctaattatgctagcaattacattaatctttgagtcaaccaagtgaagagccagtcaagtgcacctaaatatgccgcaaataaaattgaactagtaataacagttgctgtatcacgtctattttgctttgcggatggccatttaaccaatttcatttcatgaccaacactcttaaaaaacttaatcattagctttatttacctcgtttccttatgcaatgttttcttaccgcaatgtttgcaaaacttttgaagttcaagtcgctgagtgcgattcttacttgcggtgattgagtagttgcgtgacccacaaacactgcaggctaaggctgcttttttcactgccataatctcacttccaaacttttataaaaacacatacttactcagtattttatactgttgtcccttcctacgtcaataatctgatttacattactaaaagtaatcgagctcaattacaactaaatatttttattttgatttttgcttatctataataagtgtaactacttgttagaaaggacataataataaataaacatcctgaatatctattgaataaaatttctggtcctgctgatttaaaaaaattatctcttccagaaatggaaaagttagccagtgaaattaggactctaatcttagaaaaagatgccgctgaaggtggtcacctaggtcccgacttaggaatcgttgaagctacaattgcttatcactatgtttttgatgcaccaaaggacaagattgtctgggatgtttcccaccaaacttacccgcacaaaatgttaactggacgtgcactcgcttggcttgatccagaccactatgaagatgtaactccatatagcaatcctgatgaaagcccatatgactattacgccgtcggtcacacatctacctcaattgccttagcaactgggatggctaaagcacgcgatttaatgggcaaacatgaaaacatcatggccttaattggtgatggttcaatgaccggtggccttgcttatgaagggctaaacaacgctgcaattgaaaagcataacttagttgtagtggtaaacgacaatcaaatgtcaattgatgataacgtcggtggcttagttactgctttaaagaaactacgtgattctaatggtgaaaccaaagaaaatccatttactgcaataggctttgattaccgttatgtcgcagatggtaatgatatccaatcaatgatcgatgcttttaaagcagttaaaaatgttgatcaccctattttgcttcatatcaacactctcaagggcaaaggttatcaacctgcaatcgacaacgaagaagcacaccactgggtaatgccattcgatttaaagactgacaagacgacagtagcaatgcctgaaggtccgaccgctagctctattgcactcgatgttcttgaagatcacatcaataatggtgagaagatcatggctatcaatgccgcaattcccggcgttttcggcttagacagaattaaaaacaaatatcctgaaaactaccatgatgtaggaattgctgaacaagaatccgttgccttcgctgccggaatggctaaggaaggtgcaactccagttttatttgaaaattcaaccttcttgcaacgtgcatttgatcaattatcacacgatgttgccgctaatgatttaccagttgtaatgatggttgctggtggtggcatttctggcacaagtaagactcacctaggtgtgtttgatcaagtaatgatttctaacttgcctaactggatctaccttgctccaactaacttagccgaagaaaaggcaatgatggaatgggctattaagcaaaagaagcatcctgtagcaattaagatgcctaccaaagatgttcctgaaggtaaagaaattactgctgttgactattcagaaatcaagtacgacattaaaccaggtaaagatgttgctgttttagcgttaggtgatatgtacgatatgctaggtaaaaaggtggctgaaaagacaggtgctagcttagtaaatccagtttctgctaatattttagacactgccgctttagacaaattgactcaagaaaacaaagttattgttactattgaagacaatattttggacggcggttttggtgaaaaagtagcttcctaccttggcgacaaggatattaaagtactcaactacggccaaaaacgtgtctatactgatcaagtacctttgaaagaaattttgaaagacaatcgtatgacagttgatcagattgttgaagatattgaaaatgcttaatagttaatcaatctatgaaaaaaagacgcaatgcgtcttttttgttttactcaaatttctgtggatgcttatcttgaaactgagccaaatcttcataagaggcttcaagttcatgctcaatttttcgataaacgagaatcaattcttgataaatcgctacattttggggatttggaaaataaacttggctttcggcagtacgctttttaatcttttccaggtctggcttatcttctaatgcagttttagctaaaaacatagctgctagggtaccacactgctcatttttaattacaatcactggtaagttaaaaatgtccgcgattaattgtctaacaaaatcactttgcacaaagccaccagtaacacgtaaagcttgaggctgtcccacttgatcaagcaatccttgagaggcgccaagcaagttaaaaacaattccctccaaaacacttctagccatctgcggtttagtgtgatttcgcgtcaagccaacaaaagatccacgtgcttgagcattccaaattggagctcgttcaccaccaagataaggatgaaacaacaatccattacttccagccggagcagtttgtgccacatttaagacgtcctctgccgtttcatctgggccaaaaattgtttttctggcccaatcgaacacaattccaccattatttacagggccgccaagcaaataatgtttggcgtcaacagggtaacagaaaaagcgattcttttgatcaacaattgccttcggtgcaattactctaaccgcaccagaagtgccaacattcaatgcaaaatctttctcatccaaaacgccgacaccaatcgttgacaaatacccatcgcttgcgcccaaaacgatttgagtttcatcatttaaacccaatttagcacgatattctggaataattttacccacagtagattgttgatcagcaattgtcggcaattgaacttgatctagcccaatctgagccaatatcttttcatcccaggtcagcgtttttaaattcatcattccactgccagcagccatagttgtatcagttaatatttttccagttaagccccaaataatatattctttgatactaatccatttttttacttgtgcaaaaagtgttggctgttcttctttaagccacagcaatttatacactggcgccatcggatgtggcggcatccccgtttgctgataaatcattcttgcccagcccgacttttttgcccgctgcactacatcactactacgattatctgcccaagtaatgctgtttgtcagtaactcattattttcacctaagccaattaagctgtgcatctgactagaccaagaaattgccaaaatttgaccagatgctttctgacttaattgataaatcattttctgtaccgcgtcaaaaataagctgtggatcttcttcagcctgtcccgcttcttcctgaatcaatggataggaaattgccaatttagctacttcacttccatcttcgccatacaacacacctttagtcgcagtagttcctatgtctatgccaattatatatttcatctttaaaattctttcttaattttagtataaaaaaacagccaccggagaaggtagctgtcttagtggtcaaaactatgcgtgaccacggtgcgtagaacattgttttttagtcggatttacttcttaagattttcgttaacgaaggcttcgattttatcgtctgagtctttcaaaaatggaagcatatcttcttccgtcttcatggtatctctaccattcttttccataaagtagtcccaaagggcatctctaactggcatatctgaatcactccagtcaaaagcttccttcatgtgacggtctaacaatgcagtcttaataatttcgtctgccatcttaaattacctcctaaaatattctacattacttattataccgcactttcttttgatcagctatcaaaaaagcactttccgcattttctgtaaagttcgtgctcgagctctgaccagcttcattgcttcaatatttagatgatcaatcgcatactctgtacttatctcgccaattatggttaataatgcaattaattcaacgtgtgacaagctattaacaaaattattgtaagtctcatcaactggaatcgataattcagagcggcatggttcattcacgcttccttgaatgtccgccttttctagcggaatcgattgactatagatttgcctgcgacgtgccatattgtaacgtaccaaggtccgtgcatgattaaacaatttagttttatataaactgctaaatttcccctttttaggcgagaaaactagtgctgcttcataacaaacaatcattgcctcttgatcccagtctttacgatcataatgatgcaaatagaattgcttcacgattgaatttactaacggctcatataaatgaaacaatttttctaaagcttggtcatctcctgcccgtactttcttaatcagcttctcttcattaatcattcaatttatcctccacctcaaagaatacagactatcccctgagtttgagaagaaaacacatgtttaatggacagaaatgagctttatgtatctaaaaaagtagacaaaactcacacttttgtctactttctgtttattttactaatggatttctactgttataagcttgataaagcaataccccggttgccacactagcatttaaggattgtacgtgaccaaccattggcaaagtaatagtttgatccatctgctttttaagtaatggggcgatgcctttaccttcgttaccaattacgagtacagtcttgccttgggcattccattcacgataatcagtacctgccatatcagttccaaagacccagtaaccgcgtttcttcagttctttagtagtttgaactaaattattaacgcgcgctactggcacataatcaattgctcctgtagatgttttagctactaccgaagttaagccagtcgcgtgacgcttaggaataatgatcccgtcaacgccagtagcatcggctgaacgcaaaattgatcccagattgtgagggtcttcaatagaatccaacattaataaaaatggttctttaccttccgcatcatacttgtccagcaattgatttaaatctgcatattcaaagctagaaattgctaaaactagaccttgatgattgccaccagcaaccaaacgatcaagcttatttttaggcacgtcttgaacaactaaacgcttttttttagctaaactataaacttgattagcaaattcttcttgtacaccgtgttgtaaaaaaaccttattaatcttgtcggcactttgtgtttttaaataatcaagtccagcatggcgtccaaagacaaaatctttatttgaagtcataatttttcagcccgtcctcttctacagtatcaatacaccacttgcttaagtctgccactcgatcatttttccccagtaaatcaagataaccaatcattgcttcaaagcctgttgataattggtatgttttcaaactagtattcttagccttagtatgacttttagcattacgtccacgacgaaaagcagctaattcatcatccgttaacatttcttcatcttgcatcttagttaccaacgcagcttgtgctttagctgaaacatagtgagtcgcttcacgctgcaatacttgtggtttaacgataccgcctttaactaggtgtctgcgaataattaattcatacactgcatcccctaaataggctaaagtttgtccatttaaagtatccggattaacatcctcttccgttagtttttttattttagtcacgagtccacctagttccttgtggggtatcttgaatagtgatccccatttcctttaattgatcacgaatttgatcactagttgcccaatctttatttgctcgagcctcatcacgctttttaactaaagcgtcaatttcatcgtcattggagccagcatttttaacgcaaagcttattagtatccacgccaaacactaataaccaactagctaatttctctttaaacttttgcaattcttgcttgtcagctctagcagcattagcgttggcattaactacaggcaacaaatcatagatagctgttaaagcattttggacattaaagtcatcgtccatcgcctgttcaaatttttcgttagttgccataatcgcctgtgctaattcggctgattcttcactagctgtatcatcttctagacggtaattaatattagtcaaagtatttttaaagcgatctaaaattgtagctgcttgtgctaaattttcagcagaatagttaatttggcggcgatattgtacgctagccatgaagaagcgcagtacttgcggatcaacttcccttaaaatatcgtgcactgttacgaaattgtgcagtgatttagacatcttttcctgatctttaccgacagttacaaaaccgttatgcagccaataattaacaaactttttcccggtcttagcttcactttgtgcaatttcattctcatggtgcggaaattcaaggtcttgaccaccaccatgaatatcgatcgtatcgcctaaatatttggtactcatgacagaacattcaatatgccagcctggccgtcccttgccccatggtgaatcccaagcaatttcatcgggttccttttgcgccttccacaaagcaaaatcgattggatcttctttgcggctttgttctgtatcgttaatgtgctctgaagcaccctcttcaagctgttcaatattttgatcacttaactgaccgtaatgcttaaactttttggcacgataataaacatcgccgtctacttcataagcatagccattgtcaattaggcttttaacaaaagtgataatgtcattaatttcatgagttgcacggggatgcaaagtcgccggctcaatgtttagcgctgtcgtatcagccaaaaaagcattgataaaattttcagccaatttgggtacagtcgttttttcagctctcgcttcgttgatcatcttgtcatcaacatcagtaaagttagaaacatacttaacgtcataacccttatattcaaaatagcgtctaatggtgtcaaaagcaattgcgcttctggcattaccaatgtgaatatagttatacaccgttggtccacagacatacatgctgatatgtcctggaactaatggcttaaattcttcttttttacgcgtcagtgtattataaactctcacggctaacacttgtcccttctgtcaaaataactaatttttattttagcagatgaaaaaagaagctgcatttatttgcagcctctttttcaatttatctaattaaagattattagcactcatttgcttcaaggttaaatcaatgtgttctaatacacgttctttacctaaaagctccattgcttcgccaataccaggtccaaccattgaacgcgtggtagcaattctaattggcataaagagctttcttcccttgatgccagtagccttacgagttgcttgaatagcgttcatgatttgaactgaagtaaatcttgggatgaggtctaattgcttcttgaattcttcaattacaccacggccatcatcattcttgatttcttcgatttcttcgtctgaaagatccttagcttcttcaaagaaaatcttagccatgtctacaatttgcttagtgtatgacatttgtactgagtagatgttaaccaattgacgaacccattccatcttttctggtgttggatgctcatcaacaagacttgcttcttgcaagttgttcaaagctaaatcaagcaaagtgtcgcgatcagccttcttgatgtattggttgttaatccattcaagtttcttttggtcaaaagcagcaggtgacttagacaaacgtgcagggtcaaattgcttgatgaattcacgcttgttaaagatttcgttttcaccctttggtgaccaaccaagaagagtaatgaagttaaacatagcttctggtaagtaaccaagatcacgatattgttcaataaattgaagaactgattcgtcacgcttagaaagttttttaccagtttctgaattaatgatcaatgtcatatgaccaaacttaggaggttcccaaccaagtgcctcataaacaactaattgcttaggtgtgttagaaacgtgatcatcaccacgaagtacgtgagtgatcttcatcaagtggtcatcgataactacggcaaagttgtaagttggcattccgtcacgcttttgaataacgaaatccccaccaatagtgtctgattcaaactcaaggtgtcccttaacaatatcatcccatgaataagtttccatttctggaatgtggatacgaacaactggctttaagcccttagcctttgcttcatcttgagcttgcttaatttcatcagcagtcataccctcatattcgtaagtatagtgaggtgcaacacctgcagcacgttgttcttcacgttgtgcttcaagttcttcctcagtcttgtatgagtaatatgctttaccttcatcgatcaattgatcaatatacttttggtaaatttcttttctttctgattgacgataaggaccatagtcgccacccttatcaggaccttcatcccagtcaattcctaaccagtgaaggttttccatttgagacttagaaccgcccttaacattacgcttttggtcggtgtcttcaattctcaagaccatcgtacccttgttatgacgagcgaataaatagttaaaaagtgcagtacgtgcgttaccaatgtgcaagtgaccagttggacttggtgcatatcttacacggattttttctttagccaaaattcatgcctctttcaaaaaatagtaaattcaaacaatcttagtttactcgttatatagtaagaattcaattaatgctagccaaaaactaattttaaagcttggggaatactcgaaacgggaattacctcaatgccatgatcttttaatccagaatacatattatgccgtggaataaagatccgcttaaaccctactttagccgcttcttttactcgtgcatcgattttatcaactcggcgaacttcaccagttaagcccacttcgcctacaaaacaatctgtcggcgaaatttctttatcggtataactggatgcaactgccatggcaattgctaaatcaattgctggttcattcaatttaatcccaccagttgcagtcaaatagacatcttgattctgcaacattaagtttccccgcttttcaagcaccgctagcagcaatgaagctttgttaaaactaatacctgacgtggtccttttagcatagccaaaagctgtcggagtaaccaaagcctgaatttctgctaaaagtggcctagttccttcaagcgataccaccacagcagagccagtagaattaggtaatctttggtccagaaaaattgatgatggattagttacctctcttaagccttcattaaccatttcaaacattccaatttcgtttgctgctccaaaacggtttttaacagaatgcaaaattcggtaagaatggtgttcatccccttcaaaatagagaacggtatccaccatatgttccaagatcttaggcccagcaatcgcaccctcttttgtaacgtggccgataacaaaaactgtaatggcatccatcttggcaattttcattaattcacttgttacttcacgaacctgtgaggcagagccagtcatcgaatcaagacttggttcattcatagtttgaatggagtcgattacaacaaagtcaggcttaacatcattgatttgttcgcgaatatcatgcatgtcagtctctggatataagagcatattactttgacctacacccagtcggtcagcccgcaatttgatttggttagctgattcttctcccgaaacgtaaagcaccttatatttttcagataagtcactcataatttgtaacatcaaggttgacttaccaattccgggatctccaccaattaaaactagtgagcctggcacaataccaccacctaaaacgcggtttaattcctcagatttagtgacaattcgttcttctttttcagctttaatcttatccagctttaccggttcatttaatccagtcttctgaatcaaacgactagcagttgccttagtagaacgcttttgcacttcttcagtttctttttcaaattgattccaagcaccacagttagggcagcggcctaaatagcttgccgaaatatagccgcaagaacgacacttatattgtgtttttactctagccattaatcacccttcttttcattagttgatccaaagccgctaactctttttcgactaattggatcatcatcgtcggtcttcaagtatttgataaaaatgccttgagcaatacggtctcccttcttgatgtgcaagggccgtacgccataattaatcatttgtacaaaaatttcgccctcattgttaggattattgtaataatctgcatcgataacgccgatcccatttggcaaagctagattacgcttaaaagtattagatgaacgattagctaaaatcaacacttcatcttctggcatataagctttaagtccagttggcactaacaacggctttaaaatctgatccgccatctcatagtcgcgctcatacagctggtgtccatttctaatcaacctaaaaattcgcacaaaatttagtcgccaaatgctagggatagtaatgtcttcagccgcttcgatgtcatagcctgcactagctagggtctgtctgcgaggaagattaatttcctgatcttgatactttttgactacttcaaatccacgtgttttcattccaaagctccatttatcttttattttgacagttatctattttacaatgtttttagtcaacacaaaataaatagctctctattatttattacgcaaaaaaatgagattatttttttaaaaaggaattttttatgaataagcaagatgcgcaccaaattttcactataaaaaatgaagaagacatactattatctagcgttaccttagataaaatcgctcgcaaagacagtaatgtctggataatgaaccatttttttattaatccacaatttaatagtaaggatttgcttgaaaaacaaatgcaaaaagtttggcaattagctcaagaaactaacttacccatttggccgcttgatcctatgatcattgactacttcacccagcatcctcaatttcacaaaatttggtatcatcgtccatttaatcgataagattattagacgactcattttgaataagataaaattaatttaagtacttataaaggaggattttttttatggtaaaagaaatcaacaatgatactattaataaatttgaacaagacttagctaaccaccctgtttttgatgtggctagtcacgctgctcaagaaaacggtatctacaaagctagtcaaaacttacaaactaagatcgacctagatccaaccttctcaatcgaaattgatacaggtaaccctgccgatcaaaagcagtctggtcgctgctggatgttcagtgctttaaacactatgcgtcacccattacaaaagaaatttaagttaaaggacttcgaattatctcaaaattacactaacttctgggataaatttgaaaagtctaactggttctttgaaaatgtgatcgcaactgctgataaggacttgggcgatcgtaaagtttcattcttatttgcgactcctcaacaagacggcggtcaatgggacatgctttgcggtattattgaaaaatatggtatcgttcctaagagtgtttatccagaaactgctaatgctactaattcaagtgcattaaacgacactttaaatactttgcttcgtaaagatggtcttgagttacgtaaattagttcaagatggcaagtcagaagatgaagtacaagctcgcaaggaagaaatgctaaacgatgtcttccgtattttggctacttcattgggtgttccaccaaagaagttcaacttcgaataccgcgatgatgacaagaattaccatattgacagggacattaccccaaaggaattctttgacaagtacgttggcatggatttagcaaaccatatctcaactatcaatgctccaactaacgacaaacctttccacaaggtattctcagttgaatacttaggtaacgttgaaggcggtcgccaagttcgccacttaaaccttaaagttgatgaaatgaaggacttaatcattaaacaattgaagagtggcgaagttgtttggttcggttcaaacgtagttaaggattctgaacgccgtgctggacttcttgatactaacctttaccgccgtgatcaattatttgatgctgacttcactatgtctaaagccgacatgcttgattctggtgaaagcatgatggaccatgccatggtgattaccggtgttgatatcgttgacggtaagccaactaaatggaagatcgaaaactcatggggtgaaaaacctggctttaagggttacttcgtaatgagtgattcttggtttaattcatttgtttaccaagcagttatcaacaagaaattcttaccagaagatcttaagaaggcttacgatgaaggcaaagataacccaattcaattattgccatgggatccaatgggtgccttagcatttaagtattaatagctataatcaaatagttaagtgtcggaaagaaatttctgacactttttttacaacttcaagtgtcctttcttgtatcccaaaaatattaggcctacaacgaaggcgaattcggtagagaggattcaaatggtaaagtttacgtaggatgaaaaaagcatgacagactattcaaaaagacaattaaaagcattagatagaatttcaaagaaaattagtgatgctgaaagccacttcgctagaattgaagattcagtacctgatcgtcgtcaccgtactgcacaacatgaaacgattaaggatattaaatctattttgaaacatgctagaaaagtcggcgaatacgatgctaagattgatgccaaagctgatgaaaatgagtatgtttacgttgaagatgaagaaggcgtcattaaggatcttgaaaaagaattcaaagaccttgatgatagacttagcaagttaaccgatgttgatggctatgacatcaagcgttatcgtgaagaacaccattcacttgaaaaggctaaagaagttttagctaaggccggcaaattgaagtaaaacaaaatataagtaaattacacaaaagacgtagttagataaaatgttctaactacgtcttttttaccaaatatgtaataagcgggttggatctaacttacttaagttgaactgatgcacatgttgctttttattttccggaaattctttcacaaaatccgctacattatacaaaccagttgaatatgtccaaactcccttaacctttctgatcggatccaacatctcatttcgaattggataagctgaaatcaaaaagtgcttgtgatgaaacttaaagacaaaatatggcaacttaaactgcttaactgcttcatcttcagttttagcaattgaaactacatttcgataagttccatacttttctgtaaacttgtcattaaatgaaaaataaaagttcgagatatgcacatgtggaaaatcttcttcatctaccatgtcaggaaccgcaatcacatgagcataacgatctaaatttgtctcacgctgtgacaacgcatgatccatctgatttggcacaactttatgtgcccagtatggtacttctggatgtgcttcataagaacgatacatttgcttaaccacttcaggcttaacccaatcgtaatgcattctagtctgattacgcttaagcaaactctctaaggtagtatgttgcatcagatctactacaaagcattcatagtgatacttgtctacccaaggcttaaaatgttcaatcgcacttggaacgatatgcgtcccatccacaataacagtttccccatattccatcttgtgttctacaaggtgatccaccatttgctcagtacgcacagttacgtgccgcggaatgacttggtgtaaaacatccgcatcctcttgatagtaaactgtcaaatccgccaatagtagcctaatttgatcacgactgatcgcataaggatttaagtgatggcgagcaataaaagaagatttaccggagccaggtgcacctcgtaataaaaataatttacgcatgcctaatactccaaactaaatatactagaaatcataatagattttaccatagatatgtgtaaaacctcatttagagcattaaaaaaatgcactaaggtgcatttttaacattatttacgtaaaatttgtttgttaataatctttaagtgctcatccatagtataaacaatcggttccgcattaggaacttccagttttacgatgtcatgatcattaatctgctctagcttttttatcaaagcacgcaaacttgaaccgtgggctacgatcagttggtcttcaccattaatcaatcgagatgcgatatgatcataataatatggcataagtcttttttgagtttgatgtaaactttctgcccgtggcatcaaatgctgatcaaaatgcttataacggcgatcaatcattggcgacccctgcttaggtggaactgaatcaaaactacgtcgccacaatagaacttgttccacaccaaatactttacgtgaaatgtccttattaaggtcccttaaagcaccgtagtggcgttcattcagccgccaggtcttagtcatcggtagccataataaattgcagacatcggctactatatttgctgtcacaattgcacgggataagactgaagtatgaatgtgggtgggagcaaaatccgaaatggttttaatcaattcaccagctttttctgcttgttcttcaccttttttagtcaacggaacatcgttccagccagtataaacattggcagcatttgccacactttcgccatgtcgaactaatactaatttagccattctaagattccttacttcattaatactctaacgatcataacaattcctgcgatcgtgaagataattcctaaagccataaaggctctaatgccgcctttattggtaggttgcttacgcctattaaaagcataggacatgtcataaatacccataatcaatacaataatcgctgtaaaaatattaacattaaacattctttcacctaatcttcgttaataccgtggcctggaacgatcatcttgtcttttctgccacgctcgcactctgcttgtaaggtaatatgattaatacctaactctttttgtaactcctgtccaatatcttggtatagctgctctaattcatcggctcttaatcctggggctacattaatatgcgcgtccatcataataaagtcatcgctgtagcgccaaacatggacatgatggatattttgaactatggggaacgataaaacaatcttgttcacttcattcaagtcgatatcaggattagattccatcaaaacattggctgctttcattgtaatttcataagcttcatgcaaaacaaagattgaaactaaaatagtcaaaactgggtcaagccaagttacattccagaagtaaatgaagatcgcaccaattacaaccgctacactggacaaggcatcacttaacatatgaataaaagttgaccgtacattcaaattagccttggaatcgctatgcattgctagcattgaaataatattggcagccagcccaataatcgagacaatcagcataatgccaccgtgaatatgttccggcttccagaaacgttgaattgcttcaataaacaaaaccacactgatcacgatcaagataacgccattagtaaaagcggctaaagtttcagctctttcataaccaaaggtcttaaactgattacgacttttgcgactaatcaggtgcgccacaaaagataaaataattgcaccaacatcactcagattatgaactgcatctgaaagcagtgctaatgaacctgaaaaaataccacctataaattcagcaatagtaataacaacattcagtagagttacgaagacataacgcttagttgtatgatctttattcataaaatattttcctttcgttatcagtgtaccaaaaaaggccctacttcggcagtaggacttttatagctcctcagcatctacattataatcaacaatttcaaatgaaccgtcatcgtacaaaattccacgagtaacgctcccattatttggaaaaacaatatcgtttttgccattactcttattccaatattttatggacaaagttttaataaagtcaccatggctaactaacaaaactctttgttcatctttagttaaatcgcgcaaaacgtcaattgcccgtaccatccgctcatctaactcatcctgattttccgctaaatgacgcggatcagccttttttgttgctgcacgaaatttgcgcaagcctacctgattgatgatcttagttacatcatcttcatggccaattcctgcggctagtgctacttgctcccaagtctggttaatatcatcgccttcaaaagttccaaagaagacctcacgaaattcaggcagctttttaattttaccaatatccgagaccacattagcatccttcatcaagtgaacggtatcaattgctctcttcaaatccgatgaatacatgttatcaaagtgaacttgactcaaggccttagcggttctctttagatcgttaatccccttcacggttagaggagaatcgcaccaaccctgaactttgtccaattggttaaacattgtttcaccatgacgtaccaaataaacttctgttgccatcaaccttagcccccttttcattgcttaatattgtaccaaacttattgcaggtatgccgtataaaagaagtaaccggcttgaatgaaggccaagcttgcaataaaaattcgaactggcttttccggtactcgtcttaaaatagctggcccaatataaccaccaataaacatcccaatcgccaaaggaatcgcttgaagccaataaatatgcgaagtaaacataaagataattaaggctaccaaattggcaaaaccacaaatcacatttttaatagcgttaataacaataaatttatcattggtaatgtaagttaaaagtactagtacgatgactccaccagctgcaccaaagtaacccgtatacatccccataattaaaagtgcaataaaataaattattttaagccatgttggttgcgccttggtatttaaactatgatgtttcccagaaacaataatcatcaatcctgagaaagcaatgaagaatggtactgctttttcaaaaatctttggagaaaaagatagaagcaaaatacaacccaaaattgatcccacaactgtaaaaatggtatagaaccaaacttgcttccaatgtccttttaactccttagtagaagatacagttgaaccgatgctagtccaaattagcgccgcatcattagttacattagcaaatactggtggaattcctactgctagcaaaactgggtatgatgcaagtgatgccattgaggccactgacgataataagccacctgcaacaccacctaataataagaaaattacggtccagattgtcattttttaattcctttcctaaaattgtctagttcattataattctaataggaactaacacaaaggaagtttattcatggctacatttgaaactttaatttttattcccgaaggcagtttattaaatgaaaaattagcagaaaaaactgcgctgcggcaaactttaaaacattatggggtagactggggaccagctgagcgactacgctacactagcttagaaaaagaatttaaaaatttatctagcaatgatcaaatcgatttagctttatctacatttttaaaagaagatctttctaaaacgcgaactgtttttgatgatgcaatgaaggatcaaaccaggttagtcaagggcgccatcgactttattgatgaagtcagtggcaagctgcatttgattttgcttgctaaagaaaagcgcactcaaatcgaaccgcgccttgcacctacagaattgctttcttcatttgacaatgcttatttcgccgatgattttacggacaagataccaagcaaaaatattttctttaagattctgaaagacaatccagatattgatccagacacagttttagtaattggaactaatctggatgaagaaattcaaggtgcagaaaatgccaatctaaaatcattatggctggcacctaaaaaagacaagataccaatttcacctcatcctactcttcatttaagcaaattagcagatctttcattttacttagatctaatgtaagtagataattaaaatagttatagaaaggatgattttatgacaaaagttgctgtagtatttgcagacggttgcgaagaagtcgaaggtttaagcgttgttgacgtattgcgtagacttaatgttgaatgcgatatggtaggtttaataagtaaaaaagtagatggtgaccatcatattgaaatcacttgtgacaaagttgtagatgacagtttattagattatgatttggttgcttttccaggaggcatgactggttctgctaacttacgcgataatgaaaaattacgtgatctgatgattaagcgtcatgaagctggcaagtgggatgccgcaatgtgtgctgctccacgtgctcttgctcgctatggtgttttggcagatgcggacttcacttgttatccaggcattgaagaagaatgcttaaaagatgccccaagtgctcatttttcagagaaaatcaccgttactgataaagagcataaaattttaacaagccgtggtcctgctaccgcttgggcctttgcctatgcaattgctgaagctttgggagttgatactaagcaattaaagcatggtatgctttatgactacttagctgataatattcaagacagtttataatttttatctaaccaacgaaaaaacgatcaagatttttaggcttgatcgtttttgattatttacttttctttcaatttttgattgatttgtttaacatctcgcaataattgtaaaaagtacaaaccataagcgagcaagtacatcaagacaaatactccagtaattactaagaagaaatgaaccgataaagccaaatcattaatcactaattcaaaagcaaaaaaggcaacatagctaacaaaaaagtttacaataatttgttttcgtagtgaccattgcgtttgttcaaaaatcaatcctgtcaaattgaaaaatgctcccatcacaaaagagacaatcaaataaaagagcaaacttgtaaacggaatttgagcatttttccaattcgttcccgtttgaaataaagttactattgaataccaagttaatccaattcccatgccacttattccacttaccaagaaagattccattcttttcataaccctaacctctctttcaagtctttaatttttcttctagaaatttgtacccgcatttggttcttcataatgacatcaatattgccaccatccataacttccaaatgatcaattttttgataattaataattgcacttcttgacgctattaaaaaattatgtggcaaaatatttttaacctgatataattgccctttatacctgtaactctgtgttttgtcataaattaaagtttgctcttgttcgacttgaattaaataaatattttcaaacttcacaggaataatttcatcatcataactgcaccaaatcgtgtcttgttcaccacttaattctttacccaattgactgaatttattagtcatcttttttaaccaaaattcagcactttctcccgctaattgattatcaatgttaaattttaccttcatccctttttctcctttcttgcttatcagtatagacgaaaaaatattttaaatttaaaaatttcggtgaatggttaatattggaaggtaaacggtgaaaaagatcgatattctaattttttaaagaaatgccatactaaaatttaaataagcgaccagagctaatccagtcgctttattttttgtagtctcaattgcaaaaataattaattatcattaagattaattgcaaaatccaagaaaatgcccataaaaagattaatacaacgcctacaactataataaccattgcacgagaatctaatcccatttggccgagattaacatcaattattatcgttactgcacctaaaacaaaaaggacccactgtaaaatattgaatgcttgattattagttttagtttgaataaatttatcgcgttcatcatcttcttcaatcttggctataccgatatatttagtactacgcgtggtgctagttaaatcgttctagacaataagccaaattataagctaaaattgcaatttccaaccggctttgaaagcctatcagactacgtgctcgattgttctcggcattgtaataggtcagaagcgaaaagtcgctttcaattgttctgcgaatagccatcaattgatgatcattgtgctttttagctcctgtcatatttttacgatatggtgtccaaagttcgtaacccatttgttttagctgttgatgcagttctttgcctaaatagccttcgtcgccaagaagatagtaattagatggatgggtattttctatcagttcaactgtctccctggcatcatgaactgatgcctttgttacgacataatcaagaatgtaaccgtcatcgctaacaatggcatgaactttgaaaccatagaagtaaattttcttggtggccttataaccaatgttggcataaccgcgaaaaattttagcacgatagtttcgaattggttggcaaacaggtaccggaaagctgtcaatgatcaagaactgtccattcaggtcaacctttttattcatttcttgccgtatctgataaatcaattgcaatagctgacgtgaacgccgattaaaacgtgagtgtgataaacaattgaaacattcacagaatcttctttgtgattcaattcctgtcttagcttgccagataagtaaagccaaaatcagactgtccgtagttttaatttgatcaatatttcgccgatgagtaaactcagccggtgcatacaaacgataccagtgccgacaaattatcactaaatctttaaaactaacttgtaaatggtggctaaaacgcttaagcttaaggcagttcaatcagatcagactcttttctattattactatttacaagtcgagtctaacaagattggacttttttattaactaaaacgatttaactagcaccacgcgtttagtactatagaaataaccgactgtcaaacagatgcccaatattaaccaaataacatcttgaatataattgacgctttttctatttgcaacatcataaattaattctaagagctgtatgactgatagaatcgcaaaaagaattgtaagcattccttcctttggcttgctcattcttcacatactcatttaagcaaaataaagtttcaatatctgtctcaaaaaattgtactaatttataagctaaaacaatcgatggtttgtaccgacccttttctaatgaaattattgtccgttctgtaacaccaactttttcagctaactcgcgttgtgtaagttgatgttttttgcggtattccttaattttattattgataatcatcatccctaaaatatgaagcggacttcatgaaatatacttcatatgtagtactttctaatgacaagacaatactttattgactagcttcattttttataagtctaacaaaaaacacacctgattgggatgttttatttatattccattaggtcaacttcaacactaaatgattcattacctggcatcttgccactttcatgtttaattgttatgaaaccttttttgagataaagcttttgtgcaggattgccctcaagcacttctaaataaaatggcctggtcgaattttcaagcgtaaaatcaatcagtttactaccaataccttgtccttgaactttaggatcaacatagagccagccaagctcttcttcgttaaatccgacaaaaccaacaactttattttcttttgttgcaacgtaaacttgatagtcttcaaataattgctctttctttgatgctattttgaatggaataaatgcagcttcaagattggcaaattttaattcttgctttcgcgcttgatcgtggatgttgcataatttttcgaaatctgcgtcttcatatgatctaaaatttaacattttaaatttctccataaaaaatgtgatcatttgtggcctcttatttcattaaaacaaaaaggtggaaactaatatgtacaaaaatcatatcacaggtcaaacagctttaacactcaatttggattttaccattcccagcaatcacttggctaatgctatcagctggattgtggattcgattccagaagctattctgctttacaccctgctaaaacaggtcgaccagtataccacacagcagtcatgccaatgaactggttaagaagagctttatctactttaccaatctgttggctgatcaacgagggggctgtttttattgatggcactaaaattgaagctgatgctaaccgctacacttttgtttggcgcaaggctgtcgaaaagtatcatgataagctgaagggccaggcagttgaagcttacgtcagaactggaacaattagctaagacagctagcggtcgccagcgtcaagtacgctataaccctaactggcagtatttaaaagaaaaagcaaaagaagttcttcaaagcgaagaaggcaaacacatctaagaggcaaaaagaaagttgaaaccgatgttggaatagccttcatgatgatgaatataagcaaatattggaacagaaaatgaccaaaagaccgtttttatttaattttaaaagaaaaaaggacgattaaaactcacttaagaattttgatcgtcctattattatggtctaagagttagttttttcccagacactttattttttacttaagacctgtccacttccactcagtgacttcaggaatgtctttaccattatcacgaatgtattggtggtgtttagcaagcaagtcatccatttcattgatgaagtctggattcttacctgccaatgatggaatactttcaacagcatccttagccaagtcgaaacgatcaaggtggttcaggacacgcatgtcaaatggggtagtaatatcaccattttcttcgtaacagtgaatatgtatattatgatggtttcttgcaaaccagattgattccatcatagtcttgtatccatgccatgcaaagattactggaatgtcacttgggaataagcgatcaaactctttatcagagatagcattcttattatccttaggactcattaatttcatcacatctactacatttatgtaacgaatcttaaggtctgggaaacgcttgtgcaagatatcaattgcagctaaactttccaaagttggttcagtttcagttgaagcaaatacaatatctggcttatagccttgatcagttgaagcccagtcaatgtaactcaatcctttatcagctaatttagtagcttcttcaattgagaaccattgtggacgaggctgcttagaagttaccaaaacattgatgcattctctgtctttcaaagccttgtcgccaactgccaaaagcgtattagtgtctgatggcaagtactcatgaacaaggtctggacgattcttttcatataagtgagtcaagatgcctgggtcttggtgagtgtaaccattgtggtcttgttggaagacagttgaggttgcgacaaagttaagtgatggatagtcatgacgccagtattgttccttagcttttcttaaccacttcatgtgttgggtaagcattgaatcaactacacggccaaaggcttcgtaagtagcgaagaagccatgacggccagtcaaaacatagccttcaaggaatccttcatcttggtgttctgacaattgtgaatcaattacacgaccacttggagctaggttttcatcattaggttcatgaatttctggttcccattgacgcttttgatcatcaagaagtgcaaacaaacggtttgacttagattcatccggaccaaagccacggaatgtgtctgggttaagatcagcaacttcgctaaggtatttagcccattcaaccatatcttgtgcttccatttgacctggcttaaacttcaatgcgtacttgcggtaatctggcaagttcaaacgcttagggttcttaccaccattagtaactggattcatggccattctgtggtcacccttagccgtattttcagtaacgatcttcttaggtgaaccatcttcattgaataattcttctggcttgtagctcttaagccatttttcaagcatttccttatgttccatatcatcttgtgcaactggaattggaatttggtgagcccggaatgagttttcaattgggttgccatccaaatccttctttggaccagtccagcccttagggcattgaaagataatcattggccaatgtggcaaagtagcgtcattgttttcacgggcatgcttttgaatagccttaatttcttcaatgacttcatccatagtcttagccatttcttcgtgaacctgcattggatccttttcaccgtcaaaacgaccgcctttaaagactgaaacaaaatgaggatcccagcccatgccgcggaagtattcagttaattctttgtcactcatacgagaaacaatagttggattagaaatcttaaacccattgatttgcaaaattggtaataccgcaccatctttaattggattaataaacttgttactaaaccaactagctgcaagtggaccagtttctgattcaccatcaccaatttcaacagcagcaatgacgtcaggattatctaagatagcaccagtaccgtgtgaaagtgagtaacctaattccccaccttcatgaattgatccaggagtttcaggagcagcatgtgatgccacaccacctgggaaactgaagcgcttaaacaatttagccatacccttttcatcttgggtgatctctggatagcgttcagtgtatgaaccatccagatatgagttagaaaccattacttgaccaccatgacctgaaccttcaatatagaacatatccagatcatacttctttaacactctgtttaagtgagcataaataaagttttgcggagcaatagttccccagtgaccaattggctttggcttaacatcttcagcaactaaaggtgttttaagaagtggggccttcattaagaaaagttgaccaactgataagtaatttgctgcacgccaataagcatcgacgctctttaaatattcttttgaatcgtaatctacagccatgatgtcctcctatagaccatcgttatgtaaccgttttcccttacaagttaataatatcatttttgctaaagagttcaactactttcaaaattgataccatccaattttaaaatatatgaactctattcaatattttttaattctgccacatgaaatagcaaataatcaggatgttcattctttaagctatccacactaaaagcatcccaagctgctccacaagttttaacagacgctgatttgcccatttgcaaatcataacgagcatcccctaccattacactttgtttattattcaaattgtatctgtctaaaagtatcaaaataccatctggggctggcttataatgctgaacctcatcgcatcccacaaagtctttaaaatattgagtaattttcaaattatctaaatttctctttaaaatatcatgacttttactggatacaacaaataaatttttacctttttgctgtaaatcctctagtacatctcgcattccaggatataaatgtgtattttctttttcatactttccataaatattacggtaggtatcaactaattttttcgcatcactttctgacaattctctattagccattttagggaatgaaacatcagcaggaatacccataaaatctaaaatttgatcatcatctggctcatctaaattatttaacttaaatgcctgctttgtcgcaatcaatgacgccttacctgaactagccagagttttatcaaaatcaaaaaaataattttcaagcattttttaccccttagttttaggcacgctttgcatgatcttttgaatgagcattattttgaccatagtaagcatttttaccatgcttacgataatagtgtttatcaagtaggtattgtggtaaatggcaattagcacgtgttaattgcaaagtatgatagtcttcttccgccacaacttctaagactttagcattataaacagccttagctggtgtttcaccccaagtaaatgggccatgttgtgaaactaaagcacctggtgttgcttcataatcgagaccacgctctttaaaggttttgacaatagtgacaccagtattaccttcgtaatcttcctcaatttgttctttagttaatgcatcagctgctggcacatcagtatagaaagtatctgcatgtgtggtgttcaaagctggaatatccatcttagctgcagcaaatgaaacagcccaaggtgagtgtgtatgaacgataccaccaatcttttgaaaatgattatatagataggtatgtgtaggagtatctgaagatggatttctagtaccttcaaccacttcaccttttaggttaacaactaccatatcctcaggagttaattcttcatatggaacacctgatggcttaatgacgaacagacctttttcacgatcaatccctgaaacatttccccaagtaaaagtaactaaatttaacttaggtaattgcatattggcttcatagacttcttttttcaaatcttctaacattttattttccactttctaatctacaggttcttgttcaattccaacttttttaaagatcttgtcaaagaaagctttggcctctttaacttcagcaacaggatcatcatcaccgttatcacctggccacatttcaatcgtaaaacttccgttatagtctagtcttactaattcacgaagtagtccttcaaaatcaacgcagccttcaccaaatggaacatctctaaacttaccctcaaaaccatctgttactgccagagtatcttttaagtggatggcaacaatattaccaattccattctctaaatccttagcaggatcattttgtggccaagcagagaggttacccaaatccggataggcttgaagccatgggcttctaacttgctttttatattgtttaatatctgcaatgttagtaataaatggatcatccattgtttcaatcgaaagcataatgtttttctttgcagccatatgaacacatttagctaagttttcaacgtataattctctagagttctcactcttttcttcataataaacatcatagcctgccatttgaatattatgaattcctaaatctacacagagatctactgccttttggcacatttcaagagatttctttctggtttctggatctttagatccaagaggaaatcttctgtggccagataacatcaaattattaattcgaatgtcagtgtcccacattaaatctctaaattcttttctttgttccttggtccaatccaaacgtgctaagcgtgcatcactttcatctacagaaaattctaaaaaattgaagcctaattttttaactaaattaaatttttctttccaagataaatcttgtggtaatgctttttcgtaaatacctaatgagtttacagtcataacctatacctgccttttaatacaaaaagagcaatgcataataaacgtttttacgtgcattgccctttctaaaactaattaaggaattttttaatatgagtaaaattaatgattaaccccaaatgcgcttaatttcatctttatactgcttagcacgcgcatgtggatcttccgcatttctgatatcacggccggcaataaaacaatacactggtaagtctttaaataatttcaaaacttccggatgaactccgccggttactgaaaccttaaagcccatgtcaatcaaggccttaacgtttgcaacatctttttcgccccatttttggcctgcaaattttgcatccctactttggtggtaaacaacttgatcaataccattgttaagccattcttgcatacgttctttattgtcccagccttcatataattcaacttgaacttcaatttcttttctagcattaaccatggtaggaacagtagcagcgttaatacaagtcatccaatcagcacctgcatctttgcttgccttaccgaacttagtcccggcatcagcacatttaacatctgctaaaactattttatctggtcccactgctcttaaagcagatacggcctttacaccatcttgataacaaagaatggttcctgtctccaaaacatcaacttgatccattacttgtcttgcgacatttaaagcttcagcagtactctcgcaatccaaagcaacttgtaacattggtaaagccataaattaattctcctaagattatttcttaaacttatttggaatatctgaagcttcgatcttttcttttacttcaggaactgacattacattcttaacgccaattacttcgccacccttttgctttacttcatcaaacatgttcacaaaaggtaatgatgtaaataccacatcatagtttctagcagttcctctagcttctgaaacagaagtatgatctgaaactgtaatttcataacctaattgttccattgcttttcttgcggttctagaaagcattaaactagttcccgaaccattagcacaagctgacattattttcattttaattaacctctattctttaccatgtaacttcttccaaccttcataatcttcagtaatcatgaagtaacctttcttatcggcacgatattgcaattgaggaatcattaccaaaatgattattacaagagcaataccaacaaagcctaagaatttcatcaatactgtgaagaatggccaaactgtagcccaatcgaacattccgatgtaaccaccgtatttcgccatacctacccaggtagcaattaaggcagacccgcctatttggatcaatccagaaataaaaggcatgatcattgcatatttgaaaccaccacggttatttgaatacaaaccgatagcagcgttatcaaagaataacgggataaatccggcgataacaattgttggtgagtggaaaatcaacaataaaatgatcattgtgaattgtcctaatgcaccaaacaagaaaccaattgtacctgcgttaggtgaaccaaaacctaaggtagctgcgacatcgataccaggaactgagccaggtaaccatttgtctgaaataccagtgaaagattcagtcaattcattaacgaatgtacgaacacctaattgtaagattgctaagaaaactgcaaattgtaatgaagtttgtaagatgtagaaaataaaactttggccaggttgcataaatttagctttaactaagtaatctggacctaatactactaaaattgcaccgataaaaattaacatcaaaattgatgtagataccatattgtcgttgaaaattgacatgaaacctggtaactttacatcttctaatcgtctggcttctttcttacctttctttttggctctattttccaaaaattctgataatttagcgaaaataaagataccaaacatttgttggtgagcgatagcaaagccagcaccatcagttaactcttgagtaatatctacagttaagtttgaaccaacggcccaatataaacctaagataatactcataacgattaaaataggtaaatgacctaattttggaaaacagaacaagatcaaccagaaagcggtagccgcttgttgtacttgcacgttaccagttgtaaaaacagcacgtaatttagtatattttgaaaatcttactaacacgatattgataatgtatgcaaataacaacaaaagcatagtatcggcaaaagatctaccaaactctttcataattccggcagtaactgcattctgtccaaaatatggatcagttaccatcgcattcaaatgaaaacgatcttttaatccgactaaaattggtctaaaagtattgatcagtccaacagaaccagccgataaaataaagtatccaactgttgctttcaagaagcctgaaaggacctcataccatttctttttctctaagatataaccaagtaagacaataaaaccaatcatgaaagctggttgttgcaaaatattggtagcaaaataatcccatatcttagatagaatatttaatatagccatttatactccccgcttccgatatcacatattatgtttcttcattactgccttataatcgtctaaattcttaaccttagaaagatcatcaatcatgttatcttccattaacatgtcagataaatgggcaatatttttgacatgtgtattattatctttagctgctagcataaagaataattttgcacttttatctgggtctgattcatcgaatgaaactggttctggcaaaattgtaagacctataccagtacctaaaactccttcgctatcagcctttgagtgtggcattgccacaccaggaacaataacaatgtatggaccatatttcttaacatcagcaataactgaatcaatataatcatcagtaactaacttgtcttgcttcattaccttaccagcaactctaattgcttcttcccaagtctcaggatgttcatcagtaatgtttaataaattattttctaaaaagtaacgtaacatcagcgtctcctccctcagctcaacagctttggttaaagacgttgagctagttaatcaacaaaaacgggactatagcatttctgggaatggtaagtctggatcattcttaaatgcatcatggaatccacgatcatacatgtattcgaaattatctttgtcttgtggataatcaaattcaccaccaacttgccaaatatatggcttaaatttatattgcaaacggtactttttacggtcccaaagagctaaaatatccttaggatcactgtagaagttagtccaaatgtcatagtgcattggaataataacttttgtctttaaagcttcacccattctcaaaacttgtgagtcgtcaagcttatcagtgataccacgtgggttttcaccgtatgcacatagagttacgtcaatttcgttttcgttaccgtgctttacgtaagtgtttgaatagtgagagtcacctgagtgatatacgttaccacctgaagtcttaactaagtagttaacagcaactttagccatttcaattggcatagtacctgctaacttcttgtttggatcatcttcggtaacaaattcagttctatcaaaggcttccattgccttaatagttacggccccaaccttgacttcatcgccaggctttacaacaatggtcttttcctttggaacaccccattcgatccattcatcgacaacgccttgaggtccaataaatttagcgtctgggcaatacttgtttacacatgctgcagtgtaaatatccaagtgatcatggtgagtgtgagttacacataaagcatcaagatcacgaagtgcaaatggatcaattacatatggcttgtttctaaggtttggttgtaaagcttcaccaccggtcatacgcatcatttggtgacctttacgcatcttaccgtcaccgtgagtatgtttaccagtaccgttccacatatcaatagcaacgttggtgccttcatgagtcttaatccaaacccccatacagcctaaccaccacattgcaatacttttttctggtacttgcttatcagcaatttgttcattcaagaacgtaccccattctgggaaattgttttctgcaaaagttttgaaattaacatcttctattttttttggtgctgacatgaataaatcctccttaattttcttatcctcgtcttcaatgttattatgcgcttagatgtgagtgctttcaaccattatatatgttaatttagcatattttatgttaatttttgtaaaattcaagtcatttataacactaagtgtataattttttacggtaagttgaataaataattaaaaaagcccaagtcctttgaatttggacttgagctcaaacaaaaagaccagtagtctgatgttaagaacaaaaaacacattagaagctggtcttttatgaattcaattgtaactgaaatcgcaaatattataaagtctgaagataattatattaagcgtgaaagaaaaataatctgtttcttcttaaacctgattaaggaaatcatggccttggctttagctaaagttgatgatgaaatgattaccaaggttaaagcacagggctatcagattgataagaagaatgagcgctcaatcaatatggcttttggcgaagttaggtatgtcagaagaagatatgtctgcccaggcaaacaagcaaggtatcccttggatgaattaatgggctttgacaaatacaagcgctacagtattttagcagtcaaaaacatcttagaagtaagcagcgttgccacttatcgcaatactgctctagcagtcaattgcctgtctggctttaatattagccatatgcaggtgggcaatttggtaaaaatggccgggaaaaatattaaagcgggccaagaagcagattcaagatatgatgccgcaggcactaagaaaaaggtcccagttttgtatcttgaaggcgatggcgtggtgatcaaaggcactaaaagccggttggaatttcatcgctatcaggtctgtgaaggcattgtcaatataagcaagaaacgcagaaagcgaatcaatgccaaggaatttgtttctttaagccgacttgatgcgctgaacgaagccaaggagtacctggccaatacttatgatctttctgatactgtaattcttagcaacgccgatggcggtgctggatatgccaaaacagacttcgatgacattgtagggctatgcaagcgtcatgagcatttcttggatgtctttcacctaaataagaaaatcaaagaaaggctatattttgcgcctgacctgcaaggcaagctgatttctgctttggaatacaaatacagctatgacaaagttaaaactatcctaaccactgcagaaagccgactaattgatgaattgaataccgagctcaatcatgattatctggggcgcctaaggaattatattgatcgtcattgggacgatattaagccgtttaagaaacgaaaactgactgtgactaaagccattggctgctgcgagagcaaccaccgcaagtatacctaccgtgttaaggggcaaggcaagaaatggtcaaaatctggagcagaaggcatgcttaggatcttaagctgcatcaagaatcgagagctggaattttggcttagcagcgagtttgaagattcagaaataactgtattgactgaacaggaattaaaagcagcggcccgtgacagcttaaagaagcgtcatgaagttcatttaggcatccagcatggcgcattaaccgcacaggtagctggcaatagttatttaagcaagctaagcagaaatttaagtcatataaatatttaagaaattaaggttagactaatggtttaaaggctaccgcaaaaacattgacacttactttataacataaaatatgtgaattattattttgaatggtaaaatagtaaccagttcgggtcgttttttatttaaattcaaaagttaatgcttttctggtgaagtattagtaagtatttattgaagtgaaagagatcattaaaaatgaaaaattcaattcaagtaattaaaaaacgtcgcaagcaaatcattgatttactaaatcacacaagggaaatttctatttctgaattaagcaaaaagatgaaggtttctgaaatgactattcgacgagactgtgattatttgtcaaaaatgggtaagatttcaaaaaagcgtggtgtcatatcccttgttgcaccagaagaaatcccattatctcagcccgttagttacattaagcaaagcttaggaaaagaggcagccagatatattcacgatggagatatagtatttattaactctagtagtatagcctttgatgcaattccacatttattaacaaaggatataataattgttactaacaatggttatgctggaaattttgaaaatactaaaagcaaagtgatcttaacaggtggggaaatacatcataaattaatcatgagcggtgatttggcaactaaagcatttctatctttacgtgccaactatgcaattattggttgcgcaggaattagcattaaccaaggtatttcaacaccagttatggaagaagcagaagttaataaaactattattcagcaatcacaaaaggttattgttgttgccgactatagcaagttcaataaattctctaattttactattggaacaataaaagatattgatttattaataactgatacttttgtagaaaacagtgtaattaatgaatttattaaagcaggagtaaatgtaatacaagtacctttaaaatgattagcaatctaaaaagacgctcaaaaattcaaatttagaatctttgagggtctttctttatctaaatgtatttattatttcatgttaacttaagcttcattcatttgcagtaatactttacccttattacctccttgagcaactttaaccatagctgctgcagtttgatttaaggtgaaaatatcaccatagatagatgcaccttagccttggctaatatatctgctgcttcttgcaattgctttccatctgataaacaaaaataaagtaataatgaacttgttatctagccccaaagttaatatgtagttcgtgttgaatagaaaggaaatctttaattgtgaaaaaaataatacgttctcacaactttatgtatacccaagatttagatcatttaccatttagtaaagataagttaaaagattcgacctcactatcatgtaatgcttcatttcaaagatgctaaaaccatttcaagagtatctaagattttcaatgatcatgaacaatatattgaagcatggcacagtattattaacaatggctatagctatctgatccatgaaactactaatgctaagagtaaacatcattatgatccaaaagaagtagtagcttcatttgattttaaagatagaatcaatgagattagacaaaaagtcaaaaagccatcacgacaagcaattgaaaactttattgatgattattcaaatgaaaaaatcactaaagaagaacttcaagaagaaatcggtgttcttgagatggcaaaacataaaacactgttagatcatattgaagacatcctagcttacaaaaagcatcaacggtttttaaaggacttcaaaggtcagagttgtaaggtctactggatatatggtgtttccggaattggtaagactaagttagtacgggaaattttagaaaaacaacatcctgaagatttctgtatttcaggtagtcaacgggatcactttcaagaatacaaagggcaaaaattcatagtaattaatgacttgcgaccaaatgactatgactatggtcaactacttacccttttggatccttgggaaatagacaaaatggctcccgcaaggtatcacgatcgttatctaaatgcgcgtgccatttacatcactaccccttatgatccacttagtttttatcttgaatgtaatattgctaatcaagtcattgattcttttgaacagttgaaaagacgaattatcccgttgcaacttactaaaagcaatactaataaagttaaaaatgatctaatcactgatgataaattatccgaagcaatttggaagataaaatcgcaaaaaaatactagtcatgctaatagagacaaaagcaatgactagattacctactacctagattttatctcaatattggtaactaaacaatctcaggagaataatagtggctaaattattaactcgcgaagaagcttcaaaatatattggtattgatcccaaaacttttgataaagtatttcgctctgatcctgactttaaaagatttaaactaggagaacacacagaacgctttaccattaaaagtatcgaagctttcatcgatcttaaagaaacaaaattgaaaaagatttgagaaatagtcggttatctgctaactttattgctggtaagataatcggcttttcttttgaaaggacgattaaatttatggcaagtattgaaaaacgtggctcatcatatagagccagagtaacaatctatcaacatggaaaacggaaactgtcaaatcttttgtgtaaatagatctttctcgtaaattgattttttaattatttatttaatcaaagtaggattctaaggtgtcctgaacctgaccaaagcctttatgaattcgattgaaataacggtcattgtagctcattgcctggatgccaataaatgcatcaagcgactgttcagttggaaattctgccttaggcttagctttacgcttgatgacgttgttaaaggattcaatcatattggttgaataaattgaagctctgatttgtttgggataattgtagaagactagcagatcgggctcaatttccttcaaacctttgatgacatggctataagctttattccatttggcatagaatttgtgcaagacagctgcagcttcttttttgtttgtctgttgatgcacctgtttgaattcgttcatgatcttttcacgatcgtcgacgcgtactttagcgcagatattgcgcatgacatgaaccaaacagcgttgaaaatgagctttaggataagtcctggccaaggctgttttcatgccaacaacaccatcagaaagaaagagttcaacttgcttcaagcctctggacttcatgttttgaagcatctctgtccagacttcaatgttctcactaggagcaatgcagtagtcaatgacttccttatgtccattaggtttaatgccaatggcaatatagactgcttcacgctcaaacgtttctcggcgcaaaggaaggtatgtcgcatccaaatagacgcagaaaaacttgtcgcttagcttgcgtttgtggtaagcctcaacctttggaatcatctgcttggaaatatttgatacctgagctggactgtaatggctgccatacatcttttcaattagatcggctattcccctggtggtcacgccattggagtaaagcttgataatcatgctttccaagatatccgagtgctgcttgtagtcaggcagcgtgtgctgatgaaattgaccgttgcgatcccgaggcacttgcacttcaattgggccaaattgcgtatcaactttgcggaaataagcaccatttctagagttgccagtattccagccatttctggcatagggatcatagcccagaaaggcagtcaattcagcttctagcaagttattaacagcctgttgtagttctttgcgcaataaatcatttattttgtctggattgaatagagcttgagcaaaatctttggtaaaatcattcatgaaggagttcttctttctgtatgtgtttttttgttcaaaccaatcatacgagaaaggaactcctttttctaatgtttaaagaaataaatttaaggaatcattcatccttacacaaactattttacagtctcggaaaacgtgattacttaactaagagttttaaaactgaaaaagaagctaaagtttggagtactactcttgaactacaaaaggctaaaggtcaagcaatagcccagcaaaacactttattcaaggacttttattatttattcgttcaaacagtaaaagtacatgacgttagaaaagcaacttttgataattatgttaaagctggtaaagtaattgataatctttttccaaccgctaaacttggtaagcttgatgacgtacaaatgcaaagtatcttagataaatatggcaaaacacattctaagaaaacggtaactgaattacttaagaaaattagaactgctctccgctatgcttatgttaagggatacatttacaatgattttgctagtttacttaaagcacacggaaaagaattacctaaacgcaataaagcttcatcaatgtctgatctaactaagttaaaacattacttacttgaacatacagataatgaatttaacttaatggtattacttgagattagtactggtttaagacgtggtgaaattttaggtattaagcctgaggatgtgcattacgatggtcagtattattgcgttgaagtaaaacgatcaattagccctactactgacgatactaaattaaaaactaaacattctagacgcagtgtgactattcctaagaatatttacgatctattgaaggatatctctcaaaaagattctggctatttgtttgactggttcagctttaaacagtctggtatgttaaaagaattgctcaaaaaaataggcatcccttcaaccacatttcatggtttaagagatacccacgcttcttttttattcagtaataatattcctttatcttatgttagcagaagattaggacacgattcaatcttaactactgaaaaatactatctggaattaatgccagaaaaaaagcactcgcaagatgcgaatgctttaaatctattggaatccctatagcattgtgaccataggtgaccaactgaagtctccaaaacgttgatataacaacatttttgaacgtaaatattaacgctttgagaattgagaagctttacgggctttcttcaaacctggcttctttctttccttcattcttgggtcacgggttaagaaaccggccttcttaagtggactacggaagtctgggtcaacttcaagaagtgcacgagcgataccaagacggatagccccagcttgacctgagaaaccaccaccgttaacattaacgtgaatgtcgtattgaccttcagtttcagttaatgtcaatggttgcttcaagtccttaaccaagttagggaatggaatgtattgatcaacatctttatcgttaacagtgatcttaccgttacctggtactaaacgaacacgcgcaactgaatccttgcggcgaccagtacctgtgtatgcagcttgttgtgccattatataacctcctagattaatttgttaatatctaacttttcaggcttttgtgcttcgtgcttgtggtcttcgccagcataaacatgcatcttcatgaattcatggtgaccaagagtgttctttggaagcatacccttaactgagatttcaaccatcttaactgggttattagcaagcaattcaccgtatgaaacggccttcaagccgccacgccatgatgagtggtggtagtagaacttgtctgaagcctttttaccagtcaatctaatctttgatgcgttgataacgataacgttatcaccagtatcaacattaggtgtgtattgaggcttgttcttacctctcaaaatagtggcaacagcagcagaaagacgaccaagggttacgtcagttgcatcaataatgtaccacttacgttcgatttcactagattttgctaatggtgtagtacgcaatttaaattcctccgtttatttgcagtttgaaaacaataagtttccggggcctatcgtggacaaacatactatattagagtacgtccttttaggcaaaatgtcaattataaatgctgatctaagcgatatttttgtggtacttcatcataaaaaacatgataaagatataaaccgctggcatgagctgtttgtctcacttcttgtcgatcttttgccgcgattacccgctgcaaatcatgcactggtctacgatcattcccaatctcaagcaacgctgctaccatgattcgaaccatattatataagaatcctgaaccaatgaagtcaaaaatcacttcattatcttttttatcctctgtgatttttacataataaattgttcgcactttatcttcaattcgaccaccactagccgcaaaactagtaaagtcatgttttcccaacaaatcttgtgccgcaatttgcatcttttcaatatctagtggatatggaaaatgtcctgtataaaaacgtttaaatggattaacaaaatgatctaaactaacgcgataacgataccattttcctttaatggagtaacgtgcatgaaaatcatcattaacaatttgacaattattaaaaataatatcagttggcatcattgaattcatcgctaaaatcattctattcgctggtattgtcttcccaggataatcaaaatgaattacttgcccaactgcatgcacacctgcatcggttcgtcctgagccctgcacaataactcgttttcctttagtcatttttttcagtgcatcctcaattgttccttgcactgttcgctgatctggctgaagctgaaagccatgaaaaagatggccatcataagccatcgtcatcttatatcttgttgtcatatctttaatgtgtcctaaaaattaataataatccgaccaacaatacaaaatagattaatgcaattagatcatattttgaccaacttaaaacacgatatcttgttcgtccttcactactacggtaaccgcgtgattccattgccgttgataaatcaattgctgtttctaaagaatgaataaacagcggcactaagattggagtaattgcttttgctctttgaatcaaaccaccatcattaaaatctgctccacgtgatctttgagcattcataattttcaatgtttcatcaaataatgttggtacgaaacgaagtgcaattgaaattactaacgcaattttatccacaggcactttaaacaacttaagcggcttaagcaaccattccatcgcatcagcaatttcaagtggcattgtagtaactgtcattactgttgaaattaaaataattaatgtaaaacgaataaaaatatagattgcattaatcaaaccgtagctagataatgaaaaaatccaccaatgccaataaatatgaccaccagtcataaaaaacaattgcaaaagcgacgtaaagaaaattaaaccaatcaaaggcttaacgccatcccaaaatacttttgcatttaatcctgtagcgatcacagccaaaaaacaaaaaatggtcacaatcgcataagttattgaattattagctaaaaagatagccaatataaataatatggtaactaataatttactccgaggatccattttataaataagagaatctcccggaatataacgtcctacaattatcttactcataaactaccctcgcaaatttttcttaatttcattaacaagctgatccagtgttaacggtttatctttaaagttaaagttcgtcaaatctgaggcaaaaagactagccgttggttcactcaaatagtgcttttctagccagtttttattagtaaaaatcgccttaggcgcatcatgtctaattaatttaccatgttccatcactaaaacatcatctgcatattcgaccacatcatccatattatgcgtaaccaagattacagtatgacctgctttttgataatcaacaaataatttcatcatttccttacgagacttaggatctaaccccgctgctggctcatctaagcataaaatttctggttcatcagccattaccccagcaattgcaacacgccgcatttgtcctccagataactcaaatggcgacttatttgccatcgattcatccaatcctactcgcttcaaccatttcaaagctttacttttagcttcatcatcggttgctccaaaatttttaggaccaaattcaatgtcttcaagcacagtattttcaaaaagctgtgcttcaggaaactgaaaaaccaaactaacccgcttgcgtaactttttcaaattcttatttcctgtttgagcagtaatatgataaccagcaatatcaattgttcctgaactcggcttcagtaatgcattaaaatgctgcatcaaagtcgacttaccactaccggtatgacctaccaatgcaacaaaactattttcagttaattcaaatgaaacattatctaatccttttttctccattgaagttccgggagaatagatataatttactttttcaaatttaattgacatagatattgtttcaactcatctttcgtttttatatttttaggtacagaaattcccacttcatttaatttatttattaatttttgtacaaatggaatgtctagccctatttcttgcaacatttcagttttactaaaaatttcagttggagttccttgagctaaaatcttgccatcatttaagacgatcacatcatcagccatattagcctcatcaatgtcatgtgtaatcgaaataactgtcaaattcttctctttctttaaatgcttaataatttttagcacctgctctctccccttaggatcaagcatcgaagttgattcatctaaaataataattttcggttctacggcaagaatacctgcaattgctactctttgcttttgtccaccagaaagattagctggctctgcatctatataatccagcattccaacgtctgctaaaacttttctgactatttttaccatttgctcccgaggaacagctctattctcaagcccaaaagcaacatcatcgccaacagtagctccaacaaactgattatctggattctgaaatacaataccgactttttccctaacatcccagactgtcttttgatttaacgtcattcctaaaacagtgattctagaattattagcagaatcaggcaaaagtaacccattaattaatttagaaattgtggacttaccgctaccgttgtgacctatcaaagatgtccaggaacctctttttattttaaaactaatctgatcaagaatcgcttttttagtatcgggataggtaaatgagacatccttaaattcaacagcactatctactggcatttttccacttcctttcttaaatcgcttattagcaattgtaacagaaaaaaagagcaaaaaaaatcacccatgaagagggatgatttttatcatctaagctagactaagcttgcgccatcatctttacgcttattctcactttcatggataattcttaatacgtattaagttgtgttactctaaattaaactaattcaagaataaccattggagcagcgtcacccttacgaggaacggctaacttcaaaattctggtgtaaccaccattacggtccttgtaacgaggtgctacatcactgaaaagcttttgcaatgctgacttaacaacaactgcatctttttcttcgtgaacatctgcaacttcgtcacgtacaaatgcagcagcctttcttctagctgctaaatcgccgcgcttacctaaagtgatcatcttttcggcagtcttacgaacttctttagcacgagtttcagtagtaacaatgcgttcgttcatgattaattgagtagtcatttctctaagcattgcttttctgtgagcactatcgcgacctaatttacggtatgccatggatttgcctcctttattcacctaagcttagtcttcttgacgaagtgaaagacctaagtcggttaatttatttttaacttcttccaatgatttacgtcctaagttacgtacacgcatcatatctgattctgtcttgtcagttaactcttgaagagtattaatgccagcacgcttcaggcagttatatgaacgaacagaaaggtcaagctcttcgatagtcatctcaagcttcttttccttcttatcgtcttccttttccaccattacttcgctgaatttagcatttgcatctgctgattcaaataccttaaagtgttcaactaaaattttagcagcaaaactaagggcgtcattaggcttgattgaaccgtcagtccaaatctcaaaagtgagcttatcaaagtcatctctcttaccaacacgagttgattcaacttggtagttaaccttcttaattggtgagaataaagagtcaactgggataactccgattggcatgtcatcactcttattgtcacttgcagcaacataacctctaccattctttacggcaagttccatatgcaagtgtccaccttcagcaatggtacaaatatattgatccggattcaagacttgaacgtctgcatcaactttaagatcatcagcagttactgtggctggaccttcaatgtccaattcaataaccttttgttcatctgaaagagactttaattcaagtttcttcaagttcaagatgatcttggttacatcttctctgacgccaggaactgttgagaactcgtgtaaaacgccatcaatttgcacataaacaagtccagtacctggaatagaagtaagtaatactcttcttaaagaattacctaaagtagtaccaaagcctcgctcaagtggttcaacaacaaacttaccgtaagaatcttcttgttcaacaacggtaatatttggtttttcaaattcaatcattactgggcccctttcaaaacgttacgtcctatatcaaggacaaaattaaacacgacgacgttttggtggtctggaaccattgtgaggaactggcgtaacgtcacgaattgcagtaatttcaagaccagttgcttgaagtgatctaatagcagattcacgaccagcaccaggacctttaactgaaacttctacatgtttcatgccttggtccattgcactcttagctgctgcttcagctgccatttgagctgcaaatggagtagacttacgactacccttaaagcccaatgcaccagctgaagaccaagcaactgcattaccttgaacgtcagtaatcatgactaaagtattattaaacgttgagtgaatgtgtgctacaccgctttcaacatgcttcttcacacgacgcttacgtgctgttttctttgcaggcatcaataaacctccttataaataaaattaacgatttctcttagtacccttacgagtacgagcattgttcttggtattttggccacgaactggaagtccacggcggtgacgaataccacggtaagaaccaatatcaactaaacgcttaatgttcatgcttacttcacgacgtaagtcaccttcaacacggtacttgtcaacttcagcacgaagcttttcttgatcttctggagttaaatcctttgaacgaatatcttcagatactccagcatcagcacaaattttcttggcagttgcttcaccgataccgtaaatgtaagttaaagcgataacgattcttttatctcttggtaagtcaacaccagcaatacgagccataaactacaccccctctatttctaaccttgacgttgcttgtgctttggatttgctgagcaaattaccatcacacggccatgtctcttgataactttacaatgttcacacattggtttaacagatggtctaaccttcatgtttccctccgttatattactttataaaccgatacgtaattctacctttagttaaatcatatggagataattccacagtcacacggtctcccggcaaaatacgaatgtagtgcatcctaattttaccagaaacgtgtgctaaaattgtggctccattttccaattcaactttaaacatagcattaggtaaggtatcaactaccttaccttctacttcaatgacatcatcttttgccaaagttgttcctccgcaattaaacagtcatatactttgaaattataacacggataaaaaattatacaaatttttcttctattgattattactcaataccgcatcaatatcttcaaagactttttctggagtttgttcaccattaattacagtgagcaagcctttcttctgataaaagtccttcaaaggtgcattcatcttttcattaacttcaagacgattcttaacaacttctggtttatcatcttcacgttgataaaattcatggccaccacagcgatcacaagtgccctcaacttttggctgcttggaaagcttgttgtaagtagctccacaatttttacacatgtatcttgctgataaacgcttaatcaaagtgtcttcgtcaacttcaagcgcaatgacatttgttaaaggtttctccaaacgttttgtaataccatctaaaagttctgcttgtacagtggttcttggaaaaccatctaagataaaaccttctttaatatcaggttgacttaaacgttcctcaaccaactttgcagtaacttcatcgggtactagattacccttatcgatataactcttagcttcaagaccaaccttcgtcttgttagccattgcttccctaaacatatccccagttgaaatatgagttaagtgatatttatcaacgattcgctctgatgctgtacctttaccagcacctggtaaccctaaaagaattaagttaatcatttatccgttcctatctgatgaatccaacatattctctcttcattaacaagccgttaatttgacgagataactcgagaacaaccccaatcacaattaaaagacttgttcctcctaaaccaatggaacttgggagattccaaaagttagtagccaattgaggcagtaaagcaactaagcccaagaataatgaacctactgttgataatttcatcaacatctttgaaatataatcctgagtatcttttcctggccatacactaggaatataagcaccctgcttttgtaagttttctgctagcttctcagggttgacctgtacgaaagcgtagaagaatgtaaataagataattaaaagagtgtagataattaccccaggagtagtttgtaagctaaagatttggttcattactttaaaccattgttgatcgccctgggttctttgaaaggccattaaaatcgttgccggtgtaacaataaatgaactggcaaaaataaccggaataactccagatacattaacctttaatggtagaaaactttcagaaccactcatcgtcgctcttctcgtatattgaattggaatacgacgatcagcttgttcaacccatgtaacaaattgagttacgataaggattgcaactataaccgcgatgaagaacaaaatgccttgccaacgatcactagcactattattaataatttcttccttataaatttgccatagaccacttggtagtcttgcaataataccagcaaaaataattactgagataccattacctagacccttatcagtgatttcatcacccaaccatgttaataacatagttccagcagtcataataatagcaatttctatataagtctgtggtgtttgattctttaccaaacccatttgagttaaagcgttaaagcctaacgtaataccaatactctggataaaagcaacaactaatgctaaatatctagttacttgatttgttttacgtcgacctacttcaccttgttttccccattctactaacgtaggaacaatatccatctgtagcagctggataacaatctgagccgtaatataaggagaaacacccaaagaaaatattgaatagttatctagtccaccaccagatacagtatccagcattggaactaaaccagtttgcgcaacctgcgtgatcgccttcgcattaacaccgggaacggtaatgtttgcaccgatccgatacagcaaaagaataaagagcgtgaaatagagcttatttctaatttctttatctttgaaggcgttcttcaaggtcgaaaacattagatcacctcaacagttccgccagcggcttcaactgcttgcttagcagatgcggaaactttattaacctttacagttaacttaacttttaattcgcccttgccaagtaacttaacacctgacaattctttctttactaagccattatctttaagtgattctacagttacttcactgccgtcttctaacttgtttaaatcatctaagtttacaattgcatattccttgcggttaatgttcttaaaaccacgcttaggcatagttctgaataatggcatttgaccaccttcaaaacctaaacgagtatgaccgccttgacgagctaattgacccttttgaccacggcctgaagttttaccgtaaccacttgaagtaccacgaccaacacgttttctattgcgacgtgagccttcagcagaatgtaattcatgaagcttcattaatttggcacctccttgatattctatttgttaatctcttcaacagagattaagtgagcaatctttaataatgcaccacgagtagcagcgttgtctggaagaacaacagtactatccactctacctaaaccaagagctttaacgatctttctttgttgaggtagacggtgagcaacacttctaattaaagtaatctttaaatcagtcatctatgatctccctaatcttaagctctttcaggttgacgaagttttgcaacttcttcactagttctaagcttcttcaaaccatcgatagttgcacgaacaacgttaattggagtgtttgaaccaagtgactttgaagttacgtctgagataccagccatatccataacgatacgtacggcaccaccagcagcaacaccagaaccagcttcagcaggtttcaataaaatgttacctgaaccgtagtgaccaataacttcatgaggaatagtagtaccaactttaggtacattgatcattttcttcttaccgtcttctacagccttacggattgcttctgggacttcttgagctttaccagtaccaaaacctacacggcctttcttgtcgccaacaacaacaagagcagcaaatctcatgcgacggccacctttaacaaccttagtaatacggttgacagcgactaattgatcttcgatatcgtctttgtttctgcgattgttacgagaatcattgcggtttgccatgtgttaattctcctttcctagaaatctaatccgttttcacgagcagcatcagctaatgcttgaacacggccgtggtataagtaaccacttctgtcgaatacaacagtagaaatgttttttgcctttgcagcttcagcaattgccttacctacagcagcagcttgttctactttagttgcatctgatacattttcatccaaagttgaggcgcttgcaagcgtaacacccgctacgtcatcaattaattgagcgtagatgtttttatttgaacgaaaaatgcttaagcgtgggcgctcagcagtaccagaaatttttccacgaatacgtctatgacgctttaagcgtaacttgtttttatctggtttagaaatcacaatttcacctcaaaaataactacttattacttaccagtcttaccttccttgcgacgtacgtattcatcaacataacgaatacctttacccttataaggttctggtggacgtacggcacggatttcagctgcaaattgaccaacatcttgctttgaaacaccttcaacttctacatcagttgctgaagttgcctttacagaaacaccttctggtgcagtcaatacaactgggtgtgaataaccaacatttaaagtaatcttgttgccttgtgcttgtgcacggtaaccaacaccgattaacttcaaagtcttcttataaccgtcaactacaccttcgatcattgaagctaagttagctctttcagtaccgtgaagtgctttgtcgctttcgcttgaacgtgaaaagttaatttcaccatctttttgttcaaacttaatctttggatcgaagtatctagttaattcaccctttgggcccttaacagtaatattgtcgccttccttggtaacagtgacactgtcagggacttcaatagtctttaaaccgattcggctcattgattgttctcctttctgtcagtattaccaaatgtaggcaattacttcgccgccaacgttcttttgtcttgcttccttgtcggtaataacaccagcagaagtagaaacgatggcaatgcctaagccattaagaactttaggtaagtcttcagcgccaacgtagtttctaagacctggcttagaaatacgcttcaaacctgagataacacgttctccatttggaccatatttcaagaataccttgataacgccttgcttgttatcatctgcaacttcgtaatcacggatgaagccttcacgtttcaaaatttctgaaatagactttttaatgtttgatgcaggaatttcaactgaatcgtgttttgccatgttggcatttctgattctagtcaagtaatctgcgattggatctgtcatgaccatttaagctatcctcctaaccgtatactaccaactagcctttttaagaccagggatttgacccttgtgtgctaattcctttaagcaaatacggcataacccgaatttacggtatacggagtgtggacgaccacatctctcgcaacgtgtatattcgcgtgaagagaacttagcaggacgacgatttctgattttttgtgatgttttagccattaatgtcctccactatcttgcaaacggcataccaaattgagtcaaaagttcacgagcttcttcatcagtgttggcagtagttacgataacaatatctaaacctctagtgcggtttaccttatcaaaatcgatttctgggaaaatcaattgttctttaatacctaaagtgtagttaccacgaccatcaaatgaacgagttgatacaccacggaagtcacgaacacgtggaagagaaacattgattaacttgtacaagaaatcgtacattctgtcgcctctaagagttaccttagcaccgatagacataccttcacgtaaacggaagttagcgattgatttcttggccttagtgattaatggcttttgacctgagatcaaagttaattcttcaactgcttcatctaagttcttggcgttagaaactgcatcaccaacacccatgtttaaaacaatcttgtcgatcttaggtacttgcatagatgacttgtagttaaacttttcttctaatgcaggagctaccttttcgttgtattccttagctaaataacttgccatgtgtgtcctcccttctacttatcttcttttttactactaattactttaacgtttgatgcgtgaattgaaccttctgattcaactacaccaccattagcattgctttgtgaaggcttttggtgcttcttaatcttgttaacgcccttaaccactacacggtttttcttaacgttaacagaaagaacagtaccttctttacctttatcttttccggcaataacttttactttgtcaccagttttaacgaacatcagtgcacctcactatcaattataagacttcaggagcaagagagacgatcttcataaagtcgttctcacgtaactcacgtgcaactggcccaaagatacgagtaccacgtgggctcttgtctgcgttgataattacgccagcattttcgtcgaacttgatgtatgaaccatcttcacgacgtgcacctgatttagttctaacaataacagcttttacaacgtcgccttttttgacaacgccacctggtgttgcttgtttaacagtacatactacgatgtcaccaatgttaccggtcttacgctttgaaccacctaagactctaataactaaaagttctctggcaccagagttatcagcaacctttaaacgggattcgttttgaatcactgtgtaatcctcccctcactaaatccgcaaattaaacagatttcttaacaatctttactaaacggaagcgcttcttacgagataatggacgggtttccatgatacgtacagtatcgccaactttagcttcgttattttcgtcttgtgcgtagtacttctttgaatatctaatacgcttgttgtaaacagggtggttcttgtaagtgtcaacaactacaacgatagtcttgtccatcttatcagaaactacacgaccttggtatacgtgacgacgatttctttcgtttgtttcgctcaagttaatagctcccttccattaattgttttctaacgctttttcgctcagaatagtcttgattctggcgatattcttgcggactttgctcaagcgagcggtattttctaattgacccgttgcttgttggaaacgcaaattgaagagttcttctttgtattgcttttctttttctaacatttcatcagtggttaatgctctgatatctttagccttcattagattcgccacctacttccgaacttctagttacaaacttagtcttaattggtaacttagttgaagcaagacgtaaagcttcacgagcagttgcttcatcaacaccaccaatttcgaacataatcttttctctcttaactacagctacccaacctgctggtgcacctttacctgaacccatacgtacaccaacacctttagcagtgtatgacttttgagggaaaattctgatccaaaccttaccgccacgtttcatgtaacgagtcatagcaacacgagctgcttcgatttgacggttagtaatccaatgtgattcgagggcttcaagaccatattcaccaaaggcaatatatttaccacccttagcagcaccacgcatcttaccacggaattcacgacggtgttttactcgctttggtactaaaggcattatctatttcctcccttcgctggctttgaagctggcttattcttacgagtaggtaagatttcgccacggttgatccaaacttgaacaccaatttcaccataagtagtgaaggcatttacccaagcgtaatcaatatcagctctcaaagtttgtaatggaacacgaccttctgtgtgccattctcttcttgccatatcggcaccgttcaaacgacctgaagtttgaaccttaatacccttggcaccagcacgcatagctctttgagtagcttgacgcatagcacgtctgaaagcaatacgagcttcaagttgacgagcaatactatctgctactaacttagcatcaagatctggtttcttaatttcaacaatattaatgtgaacttgcttaccagttaaagcatttaattgttttctcaaagcttcaacttcagaaccacctttaccaattaccatacctggcttagcagtatgaattgaaatgttgattctgttggctgcacgttcaatttcaacagtagatactgaggcatccttcaacttttctgaaataaattttctgatttgaaggtcttcatttaaagtttctttgtatcccttgtcagcataccattttgattcccaatcacggataacaccgagacgaaaaccgtttgggttaatcttttgacccattaatatacctcccttaatcgttcttttctgaaactactacaactacgtgactggttctcttgttaattggagaagccatacccttagcacgtgggcggaatctcttcaaagttgcaccttcatttacgtaagcttctgatacgtaaaggtttgcactttcaagatcgtagttatgttctgcgttagcaatagctgaacgtaaaactttttcaacgattggggaagcagctctaggcgtaaattccaagattgctaatgcttcagcaacgctcttgccacgaattaagtcaacgactaaacgagcttttcttggagcgatgcgaacagttcttgcttcagccttagctgaactaatttgttctgccatttagatgtttctccttcctctaagcttgtgttgtggctttatcatcagtggatttgtgtccgtggaaagttcttgttggaacaaattcacctaacttatgaccaaccatgtcttcagttacatatactgggacatgttttctaccatcgtaaacagctatagtcaaacctacaaaggaagggaaaatagttgaacgacgtgaccaagtcttaataacttgcttcttatctgcatctgcttgtgcatcaaccttctttaacaatgatgcatcagcaaaaggaccttttttaatactacggctcattaattaaccctccttctactacttgctacctttacggtgacgaatgattaacttctcgctggccttcttggtatctctagtcttaataccacgtgccttcttaccccatggagtcataggttgaggacgaccaactggagccttaccttcaccaccaccatgtgggtgatcgttagggttcattacagaaccacgtgattgtggacgcttgcccaaccaacgtttacgaccagctttacctaattgaatcaatgagtgttgttcattaccaacagtaccgatagttgcacggcatgatgacaaaatcttacgaacttcaccactttgtaatcttactaaagtgtaatcaccatcagcacctaaaacttgagctgaagcaccagcacttcttacgagttgaccacccttgcctggctttaattcgatattgtgaattgaagtaccagttgggatattctttaattccaaagcgttacctggcttaatgtcaactgaatcacctgattcaactacatcgccaacttttaagcccttaggagctaagatgtaagctttgataccatcagtgtagtgaagcaaagcaatgttagcagttctgtttggatcgtattcgatagcctttacaactgcctttgcgttgtccttgttacgcttaaagtcgatgatacggtatttttgtttgtgaccaccaccacggtgtcttacagtgatatgaccatatgagttacgacctgcagtatgtgattgagattcaagtaaagtcttttcaggctttgtcttggtgatctcagcaaagtcggaagaagtcatatgacgacgaccattcgtggttggcttgtaaatcttaatagccaattgactgacctcctattacttgttgtcttctgtgttatcgtcttggaaaatcttgatgtcgtttgaatcgttagttaaagtaacgatagcctttctacgacgagcggtcttaccagtgtaacgacctactcgcttgtccttgccgcgaacgttcataatgtttacgttcttaactttaacatcgaagatttcttcaacagcattgcgaacttgtgtcttggttgcagttaaaagcacgtcgaatgtgtacttcttatcatccattaagttcgtggacttttcagtaatgacaggtcttaaaatgatatcgcgtgcgtccattaagccaaaacctcctcgatcttcttaacagcatcttgatctaagatcaacttgccatagttaacagcatcttcaacgtttaagccattaactggaacaaccttaaccttagtcaagtttcttgcggaaagttgtacattgttatcatctgaaacaattaaaactttaccgtcagcatttaagccgtttaacattgatactaattccttagtcttaggagctgacatagtcaacttatctaaaacaattaaatcattgtcaatcaacttttgggaaagaactgacttaatagccaaacgacgttgctttcttggcatagtgtatgcgtatgaacgtggagttgggccaaagactgtaccaccaccgcgccattgtggagctctgatagaaccttgacgagcacgaccagtacccttttgtctccaaggcttcttaccaccgccgcgaacagcagatctattcttaacctttgaggtaccttgacgcttgccggctctttgtctaataattgcttcaaaaacgacactttcatttggttcaataccaaaaaccttatcgtttaaagtaacttcaccagagtctttaccgttttgatccataacttttaaattagccattctagtcctccttcctatttatcagcctttacagctttagaagcagttttaacaacgattaatgagttcttagcacctgggacgttacccttaatcatcaatacgttcttgtctgcaacaactttttcaattactaagttttcaatggtaactttcttcacacccatgtgacctggcaaacgcttgccctttggtacacggttaatgatggaacccattgaaccaggaattctgtggtatcttgaaccgtgagtttctggtcctcttgattggccccaacgcttgatgttaccttggtatccatgacctcttgaagtaccagtaacgtttacaacgtcaccttccttaaatgtatccacagtaacttctgagccaacttcatagtccttaagctcaacaccgcggatttcccgaatgaagcgcttaggcgaagtctttgctttatcagcatgacctttttctggtttgttgctcaaaacttcacgcttgtcttggtaacctaattgaactgcttcgtaaccatctgattcaacagtcttaacttgcataacaacgttaggagttgcttcaacaacagttacaggaacaaggacaccatctttagtaaagatttgagtcataccaacttttcttcctaagattcctttggtcatgtttacacctctttctatttaaattacagtttaatttcgatgtctacaccgcttggaagatcaagcttcattaatgaatcaacagtctttggtgttggattcaaaatatcgattaaacgcttgtgagtgcgcatttcgaattgttcacgtgagtccttgttcttgtgtggtgaacgaagaactgtgaataaagttctttctgttggaagaggaactggacctgaaatttcagcaccagttctctttgcagtagctacgatcttagcagctgattcatcgagaataccatgttcgtaagacttaagtctaatacgaattgtttgacttgccattaaattacctccttaacgtcttctttaaaagatgactcgctcggcaaaaatttcccgcacgccactgtggcaatgcagcctggcgtgccgcaaccttttgcgtcaacgctttacaacaattttcacacttaagggcacactgtcccataagcacaaagactattgtactttgtccctccttaaatatcaagggtttacgacttttttcttaaatttatttacaaaaaaagagttatcaaaataaaaatgataactcttttttatatgaaattgttttcaattaagctactgcattaatcagttcttaacggaagctattcagcatctccgccgcgcttcttaatgatgtcagcttgaattgatttaggtgttggtgagtagtgatcaaataccatagtaaatgtaccacgaccttgagttgatgaacgcaaagtagttgcgtaaccaaacatttctgaaagtggaacaaatgagttaatgatcttagcaccggctctgtcttccataccttccatggtaccacgacgagcagtgattgaacccataacgtcacctaagtattcttctggagtagttacttgaaccttcataattggttccaagataactgcgccagcctttgaagcagcattcttcaaagcaagtgaagcagcaaccttgaaggcagcttctgatgagtcgacttcgtgataactaccatcgtaaagcttagccttaacgtcgatcaatgggtaacctgcaagaacaccattcttcatagcttcttgtaaaccttggtcaactgaaggaatgaattcacgaggaacaacaccaccaacgatggcatcttcgaattcgtaacccttaccttcttcgttaggagtaaagtcaatccaaacgtcaccgtattgacctttaccacctgattgacgaacaaacttaccttgtgccttagcttccttggtgaaggtttcacggtaagcaacttgtggttcaccaatcttagcatcaacgttaaattcacgtctcatacgttcaaccatgatgtcaaggtgaagttcacccatacctgaaatcaaggtttgaccagtttctgggttagtttcagcacggaaagttgggtcttcttcagtaagcttttgcaaagcaacgtccatcttatcacggtcagcctttgacttaggttcaactgatacttggataactggatctggaactttcaagctttccaaaataagtgggtgatctgggtcagttaatgagtcaccagtagtggtgttcttcaaaccgatagcaccagcgatgtcacctgagaatacttctggaatttcagtacgtgagttagcgtgcatttgaagcaaacgacctacacgttcacgtgaattctttgaagcgttcaatacgtatgaacctgattcaagagaaccggtgtaaacacggatgaaagtcaaacgacctacgaatgggtcagtagcaatcttaaatgcaagagctgcaaatggcttcttatcgtcagccataagttcaacttcatcaccagtcttaggattgtgagcaacgtaaggcttaacgtcaagtggtgatggcaagtagtcaataacaccgtcaagcatcatttgaacacccttgttcttgaaggctgagccagcgtaaactgggaagaacttcaagtccaaagtagctttacggatagctgcctttaattcatcgttagaaatttcttcaccgccaaggaatttttccatgatgccgtcatcaacatcggctacggcttcaattaagtcgttacgacgtgcttcagcttcttccttgtattcgtcaggaactggaacagtatcccacttagaaccaagcttatcttcgtcgtagatgtcggcaaccatgttgattaagtcgataacaccttcaaaagtgtcagctgaaccaattggcatttgaacagcatgggcattagcgtttaaacgttcgtgcaatgacttaactgacttatcgaagtcagcaccgatcttatccatcttgttaacgaaaacaatacgaggaacaccgtaagtttcagcttgacgccatacgttttcagtttgtggttcaacaccagcttgggcatcaagaacagttacggcaccatcaagaacacgaagtgaacgttctacttcgatagtgaagtcaacgtgtcctggggtgtcgatgatgttaattctgtggtctttccattgtgcagtagtagctgcagaagtaatggtgataccacgttccttttcttcatccatccagtccatttgtgaatcaccttcgtgagtttcaccaattttgtggatcttaccagtgtagtaaaggatacgttcagtagtagtagtcttacccgcatcgatgtgggccataataccgatgttacgtgtctttgctaatggaaattcacgcttgttagccataaattattctctccttaaattaaaacgaacaaattagaagcggtagtgtgcaaatgcacggttagcttcagccatacggtgaacatcttcacgcttcttaactgctgaaccagtgttgtttgaagcatcgataatttcgttagctaaacgttcatccatagtgtgttcgttacgtaaacgagcgtatgaaacaagccatcttaaacctaaagtagttcttctttcaggacgtacttcaactgggatttggtagtttgaaccaccgatacgacgagctctaacttccaaaactggcataacgttgttcatagcttcttcaaatacatcaagtggttccttaccagtcttgtcttgaacaatgttgaaagcatcgtaaaggattgaagatgccttagctctcttaccatcgaccattaagtggttgatcaacttagtaacaagctttgagttgtaaactggatctgctaaaacgtctctcttagttacgtgaccttttctaggcattatttaactcctcctttaatctttcttagtaccgtacttagaacggctttgctttctgccatcaacaccagcagtatcaagggcaccacgaacgatgtgataacgtacaccaggaaggtcctttacacgaccaccacggattaatacaactgagtgttcttgcaagttgtggccttcacctggaatgtaagcagtaacttcgatcaagtttgaaagacgaacacgagcgtacttacgtaaagctgagttaggcttctttggagtcatagtaccaacacgagttgcaacaccacgcatttgtggagctgggttgaatactgattccttcttcatactgttgtagctgtaattcaaagcaggtgactttgacttagtgacctttgaatgacggccttttcttaccaattgattaatggttggcattaatttttcctcctaaaatactattttgttcacacatccgggagtttcttttttactcacgaatagactgttcaaaacatacaaagactattgtactcggttttaagcagaaagcaaactttttcaaaataaaaaaagaaaaatcggctatttttgcgtaataaatagtggaggtgtttttttgaaatacttatttatttttactaactttataattggaagttgcttggcttctcacgcagcagtagtttacgagcactggaatgataaaaattttatttactcacgttctcagtgcaacaactgtcaccttgaattatcaattttggatgaaattccattattatcttatctttttcttcaaggaaaatgtcgttattgttatcaacaaattccagttgaattatttttatttgaattaattggcggctttgccttttgtttactcgattttagtaagacacaggacattattaccgctattttgcttttttcgcttttagtcgttgcaatctctgattatcaaaagcaagaatttgatcttctcctactaattccagccattagcgttgcgattttattcaaccaatttgcagcttttacattaatcgactggatctcttttacattattgctaggaatttttagctatagcataatgcaaagaaaaatggggctaggcgatttattaatttacttaattatcgcttgctacttcaccccatcatttgccaatttagtttttctatttgcttcaatcttggtaattgcaatttttcttattgaaaaaactcctattaaccatcgctatccatttattccatatattttcctaggattagtactaacccaattaattttttagacaaaaaaataagcattcccgctcttaaaagattggaaatgcttatttattttcaataaagcttagtcttgcttagctttatccttttctttcatttgcttttcaatatcagcaattgagtatactgaatctggcttcttaacgtcagcttcaggttccatgctgcggtatacaggcataccagtaccagctggaataattttaccaataataacgttttccttaagtccaagaagtggatcattcttacctctaatagatgcatcagtaagaacacgtgtggtttcctggaatgaagcagctgacaagaaactgttagtttccaaagcagccttagtaatacccaagataacgctttgagcagttgctggaataccaccagaaataataacttccttgttgcggtctctaaattgaccaatatccataacttcacctggcaagatgtcagtttcacctggatcaaggacacgaaccttttgcagcatttgacgagttaacacttcaacgtgcttgtcggcaatgtctacaccctgcattctataagccttttgaacttcagctaagatgtacttttcagtagttaatgtatcagtaacttgaatcaattccttaggatcaacagaaccaagagttaacttgtcaccacgatgaacgtagtcaccttcgctaacagcaactgaagctgtataaggaacactgtagcttctagtatcaatcttacccttaacagtaatttcacgagtatgttctgctgggttttcttgaattgaatcaattacaccatcaacttcagaaatggttgcacgacccttagggttacgtgcttcaaacaattcttgcacacgaggcaaaccttgagtgatatcttcagcaccggcaacaccaccgttgtggaaagttctcaaagtaagctgagtacctggttcaccaattgattgagcagcaacagtaccaactgcttcaccaacttcaacttcttcaccagtagcaaggttcataccgtaacacttgcgacatacgccgtgaggagtatcacaggtaagaattgaacgaatcttaacgtgagttacacctgcatcacaaatcttgtgtgccatgttttcatccatcatgacatctctgccgacaatagtttcgccagtttcaggatctttaacagtctcagcagtgaaacgaccaaccaaacggtcaaataatggttcgatcatttcgtcaccttccatgatggcactaactgtaataccacgatcagtaccacaatcgtcatcacgaataataacgtcctgagcaacatcaaccaaacgacgagtcaagtaacctgactgagcagtcttcaatgcagtatcagtcatacccttacgagcaccgtgagtagacatgaacaattccaatactgacaaaccttccttaaagtttgaagtaacaggaatttcgaacaaaccaccgttaggagtggccatcaaaccacgcataccggctaactgagtaaagttagaaatgttaccacgggcacctgagtctgccatgattgaaattggattacgaggtgcgtgaatttgtgcaatttcgttttggatcttgtccttacatgcattccaaatactaattactcggtcgtgacgttcttgttcagtaatcaaaccacgtctaaattgcttagaaacaacatcaacttgtttacgtgccttggctaccttttcatccttatcttggatttctggaacgtcagtcataccaatagtaatacctgaagtagttgagctaatgtagcctaacttcttcaaatcatccaagtattctgaagttctttgaaccttgtaatacttgtaaatagtagcaatagaatctgacaagaagcttcccttaaatggactagcgattaaatcatcgcctacttcatcgatcttcttatcaatctcttcgccttcacctaagaagtacttagcatccaacggattgttcaagttctcttcagttggttcattgatatagaagtaatcatctgggaacaattgattgaagacaatcttaccataagtggtaataaagatgccgtgttcatgtcccttaggccatggctttttaggcatagcatctgcagacataccaataatggtatggtagtgaatatcgccattttcgtaagctacagcagcttctgctggtgagctgaagatcataccttcaccttcacgaccgcgttcggcctgagttaaccagtagttacccaaaacgatatcctgtgatggagtaacaattggcttaccatccttaggagccaaaatgtggtgagcagccaacattaacaatcttgattcagcaacagcttcatcagaaagtggtacgtgaatagccatctggtcaccatcgaagtcggcattgtaggcttcacaagctaatgggtgaagtctaattgacttacctggtaccaagattggctcaaaggcttgaatactcaaacggtgaagagtaggtgcacggtttaaaagaactggacgttccttaatcacatcttcaagtacatcccagatatcgtcatcttcacggtcaatcttacgcttagcattcttgatgtttgatgcaattccacgtttaactaattcatgcattacaaatggcttgaacaattccaaagccattggacgtggcacaccacattgatagaatttcaattttggtgaaacatcgataactgaacgaccagagtagtcaacacgcttaccaagcaagttttgacggaaacgtccttgcttacccttaagcatatgtgaaagtgacttcaatggacggttacctggtccaacaactggacgaccacgacgaccgttatcaattaaagcatcaacagcttcttgaagcatacgcttttcgttttgaacaataatattaggtgcgttcaaatcaagcaatctcttcaaacggttgttacggttgattacacgtctgtacaaatcgttcaaatctgaagttgcaaaacggccaccttcaagttgaaccattggacgaagatctggtggaattactggaacggcatccattaccatccattcaggcttgttacctgaattcttgaaggcatccaagatatctaaccgtctaattgcacgcgtacgtttttgaccagtggcagtttgaagttctttcttcaaatccttaacttctttatcaaggtcaactttcttaagcaaatcgcgaacagcttcagcacccatcttagcttcaaaacggttaccgtacttagctttttgttcacggtattcagcttcagttaataattgcttaggttcaaggtcagtatcacctggatcaattacaatgtatgcagcaaagtaaataacttcttcaagtaatcttggagaaatgtccaaaactaatcccattcttgatgggatacccttaaagtaccaaatgtgagttacaggtgcagccaattcaatatgacccatacgttctcttcttacctttgaagaagtaacttcaacaccacaacggtcacaaacgataccacggtatctaacgcccttgtacttaccacaagcacatgaccaagcttttgttggtccaaaaattctctcatcaaataagccatctttttcaggctttaaagtacggtagttgatggtctctggctttttaacttcaccatatgaccagcttctgatcttgttaggtgatgcaagaccaatttgcatactttcaaacttatttacgtcgatcaaaagtttaacctcctactatttagaaactttatcgtcagactcatctgcaggagctaccggcttatctgcattttctttactgtctttatcttctgattttccagtttcttcggctaacttcttcttttcttgctcttctgccatccgtgacaaagtatcgatgttcaagtgttcacttgagtcttcatccatatcacgaagttcaatttcattatggttcatatcaagaacacggatatccaaacctaatgattgaagttccttaacaagaacacggaatgattctggaacacctggcttaggaatcttttcacccttaacaatagcttcatatgcctttacacgaccaacaacgtcatctgacttgtaagtcaaaatctcttgcaatgtgtaagcagcaccataagcttcaagggcccaaacttccatttcaccaaaacgctgaccaccaaattgtgctttaccaccaagtggttgttgagtaaccaatgagtaaggcccaattgaacgtgcgtggatcttgtcgtcaaccatgtgggtcaacttcaagtagtgcataacacctacagatacacggttgtggaatggttcaccggtacgaccatcataaacaacggtcttaccatctttatcaacacctgcttgacgaactgtgtcccaaacgtcattttcgtcagcaccatcaaatactggtgttgcaacgtgaatgcccaattgacgagcagctgcacctaagtgcaattcaagaagctgtccgatgttcatacgtgatggaacacccattgggtttaaacaaatatctactggagtaccatctggtaagtatggcatgtcttcttctggaacaactgcagcaacagtacccttgttaccgtgacgaccagacatcttgtccccaacttgaatctttctcttttgagcgatgtaaacacgaaccattgtgttaacacctggtgaaagttcatcgccggcttcacgagtataaaccttaacgtcttgaacaataccgccaccaccgtgtggtacacgaagtgaagtatcacgaacttcacgagctttttcaccgaaaatagcgtgaagtaatctttcttcagcagataattcagttacacccttaggagttaccttacctaccaaaatgtcgccatcgtggacttctgcaccaacacgaacgataccatcagcatcaagatccttcaaagcatcctcaccaatattaggaagttctctagtaatttcttctggacctaacttagtgtcacgagcttctgattcataatcttcaatactgattgaagtataaacatcatccttaactaatcgttcagaaagcatgatggcatcttcatagttgtacatgttccaagtcatgaaggcaatcaatgggttttgacctaaagcaagttcgccatgatccatagttggaccgttagcaattacatcactcttgtcaacctgatcacctaatttaacattaggagtttggttgtatgacttagagttatttgaacgacggtacttttcaagtgtgtatttgtccaaagtaccatcttcacgtctaatacggatttcattagcatcaacgtattcaactacaccagcagccttagcgattaaagcagcacctgaatcgtgtgcagcacggtattccataccagtaccaacaagtgaaccatgcggattaattaatggtgcagcctgacgttgctggttggcacccatcaaagcacggttagagtcatcgttttcaaggaatggaatacatgctgaagcgacagaaacaacttgcttaggaataacgtccatgtagtcaatcttatctggagaaacttcgacgttatcttccttttgacgagccaagatcaacttctccttaaatgaaccatcatcattcaatggagtgttggcaccagcgataatgtaattatcttcttcgtcagcagtcaaatagtcgatcttatcagtaaccttgtggtccttccaagaaacacgacggtatggggtttcgataaaaccatacttattaataatcgcatatgaagcaagtgagttgatcaacccaatgttaggaccttctggagtttcgataggacacaaacgaccatagtgagtatagtgaacgtcacgaacttcataaccagcacggtcacgggtcaaaccaccaggccctaaggctgacatacgacgtttatgagtcaattcacctaatgggttatgttgatccataaactgtgaaagttgtgatgaaccaaagaattccttaatacttgcaacaattgggcgaatgttgatcaattgttgtggagtaactgttgaaggatcttggattgacattctttcacgaacaacacgttccatacgtgccaaaccaattctaaattggttttgaagaagttcaccaacacgacgaatacgacggttacccaagtggtcgatatcatcagtagtaccaatttcatcttgcaatgcaaagaagtaattgattgaagctaaaacatcagctggagtcaaatgcttaacgttatcagcaatatgaccatttgacattaatttaacttcacgttcagggtctacctttgagtaaaccttaatttcttgaactgtaataggatctggtaatacgccttcctttgaaggttggtaagttaccatcttaaagtcatcacgatcaaggtatggagctaacttatccattacttcgtgggtaactacagtacccttcttagcaacaatttccccagtatctggatcagctaaagtttcagctaaagtttgaccgtataaacggttcttaagtgaaagcttcttattgatcttgtaacgacctacaggtgctaaatcgtaacgacgtggatcaaagaaacgggcatacaaaagtgaacgtgaagaatcagtagtctttggttcacctggacgaagtctttcatagatatcctttaaggcttcagctacacgtgagtcagctgggttcttatgaacatccttgtccaaagtgaattgcaaagtatcactttgaccaaacatatcaataatgtcactgtcagagccaatacccattgctctaatcaatacagtaagaggcaatttacgagtacggtctacacgaacaaatgaaacgttctttgcgtcggtttcatattcaagccaagcaccacggttaggaataacagtagtaccaaagatttgacgaccattcttgtcataatcgccagtgtaatatacaccaggtgatcttaccaattgtgaaacgataactctttcagcaccgttaacaataaatgaacctgattcggtcattaatggcaaatcaccaaagaaaacatcttgagtcttaatttcaccagtttcttggttagtcaatttcaaggtaacgtgcattggtgcagcataagttgcatcatggttacgggcttcatcaactgtatactttggcttttgcaatttatagccaacatattctaatgaaagcttacctgagaaatcgctaatcggcataatgtcatcaaagacttctttaatgcctttatcaagaaaccacttatatgattcggtttgaacatcagttaagttaggtaacttcaatacttccttaatgcgggagaagctacgtctagttcgatgtttaccgtagttcactacgtgtccatttaacaaggaaaaacatcctttctgtctaagaaagcaaatattacatttctgttacaaattcaaaaaactgcaattttaggcataaaaaagacaaaaacaacaattgtcgtttttgtcccttatcattttgctggacaatagatcagcaaaatcctgaatctcagtctttttaaatcagcaaaaattatatgatattttcagcattttgtcaaggtatagcaccaatatcacttgacttttacagtttcttttttcggattaactacttcaaattttaaatgtccatgctgactaccaattttcaaagtgtcgcctgacttaacttcgcctacaatcagcatctcggcaatcttgtcttcaatatcattttgaattgctcttctcaatggtcgagcaccattttctggatcataaccatcttgtgcaatctgatccagtgctgcccgtgatagcttcaattcgatacccttcttttgcaaacgaactaccagcttgtgcgttaacaaagttacaatattgcgcagctgcttcttatctagttcatcgaagataatagtttcatcgattctgtttaaaaattctgggcggaagaattgtttgattgcttgttcaactttagctgatctcgccttggctggatctgcattatctgcattgaagccgactgccttattatcaaagagcgaacgagaacctaaattagaagtcatgattataattgtatttctaaagtcgacttttctacctttggagtcagtcaaaaatccttcatctaaaacctgcaaaagcaagttaaagacatctggatgagctttttctacttcgtcaagcaaaataaccgagtacggatgacgacgaaccttttcagataattgaccgccttcttcataaccgacatagcctggtgccgagccaattaatttgcttgaagcaatttggtccatatattcagacatatctagcctaatcaaattgtcttccgagccaaacattgctgctgcaactgacttagctagttctgtcttaccaacaccagttggacctaggaacaagaaggaaccaatcggacgacgttcatctttaatcccgcttctactacgacgaatagcacgggcaactgctgaaacagccttatcttgcccaataacacgttggtgtaaaatcttttccaggttagctagctgccgtgattcattgcgttccatctgggtaacagggacgccagtccagttggaaactactttagcgatatcttctggctcaaccacagctttagcactaactttgtcttctaacttctctaccattgcttcacgttgcatttctaagttgttctgctcatcctgcaattgagcagctttaacaaagttttgactagcggcagccatattcttttgcgtaatcagtttcttaatttgctcattaactttttctagctcagcatcattgctaatgttattacgaatcttaactgcggcactagcttcatctactaagtcaatcgccttatctggcaaaaagcgatccgaaatatagcgcgttgacaaatcaactgcatccttcaagctctcatcagaaatagtcacatgatggaacttttcatatttcgacttcaagccacgcataattgtcaaagtgtcatctcttgaaggctcacttaagcgcacttgttgaaaacgacgtgccaaagcttgatctttttcaatgtacttttgatattcattaaaagtagttgcaccaatcatttgaatatcgccacgagcaagcgaaggcttcaagatattagaagcatcaattgcaccttcagcaccaccagcaccaattaaagtatgcatttcatcaacaaagagaatgacattgccatccttggtgacttcgttcaggattttcttcattctgtcttcaaactcaccacgatacttagtcccagcaactaaactacctaaatttaaggccattacccgtttcttaagcatatcctgtggcacttttttgttgacaatctcagttgcaatcgcttcagcaacagcagtcttaccaactcctggttcaccaactaagacaggattattcttagtccgtcgagacaaaatttgaatcacacgcttaatttcttggtcacggccaatcaccggatcaatctcgccattacgcacacgttgatttaaattaaccgctaccttatctaagttaggagtagtgctcttgcgcttcttttgaccagtcgtcgtgttatcatcacccagccaattagctgaatcaccaaagtcttggtcttgactcaaactgtcttcaacatcctgctgcagacgaggaatatcaacattcaagtttttcaaaatcattgctgataaaacctgctcacttgcagtaattcccagcaaaacatgattagtgttaacttccttaactccatcgtcattagctcgtcttctagcataatccaaagctaaactcaaacgtggtgacatttccatgtagcttgccttaggggcagagccataacctgtataacgttcaatttcttcacgtactgcagttggtgttaatccccatgaacgcaagatttttcctgcttcaccgtcagtttcaattactagagccaataaaacatgttctgtgccaatcaagcgatgatgaaaattttgtgcttgttcacgtgcaattttcaatacttgattaacgctcttactatatgaattttccatacaaacaccaccctttaaaatacgttatggtattttacttttcttttgtcagtaagtaaaacaatttgacttatcttcaacttcattatgtccaattctaataattacgcaaaaattgctttcgctatttcagttaaatactttttatcaatttcgtcaaaattagctagcttggtcgaatcaaaatcaaagacgccccaaagttttccctgattaaaaattgggacaacgatttccgaatttgaagcactatcacaagcaatgtgaccagcaaattcatgtacatccttaacaatctgcgttgtttttgcttgtgcagccgtaccacaaacaccttttcccatttgaatatgaacacatgctggcatcccctgaaatggacctaatatcagttcatcattttcatagcgataaacacctgcaaaattcacatcatttaacgaattaaacaaaagagcagataaattagctgtattagcaatccaatcatcttctccctcaatcaaagctctagcttgctccactaataatttgtatttttcttcagtagttgccgtcatttttaatctccctttaagttttaaaagatattataacaaaaagaaaaaagctacccaaacggatagcttgtatatcgggaaaatcggacttgaaccggcgacctctacgtcccgaacgtagcgctctaccaaactgagctatttcccgtaaaaaaagactcaccacttggtgagccttctatcttggagcggaagacgggattcgaacccgcgacccccaccatggcaaggtgatgttctaccactgaactacttccgcaacaacagatattattatagcaaatacatttttctttgcaagacctttttatcaaaaaagataaatttattttaggcacaaaaaaagctcacattcgtgagctcttcatcttggagcggaagacgggattcgaacccgcgacccccaccatggcaaggtgatgttctaccactgaactacttccgcgatacaaaaattattatagcaaagattattctctttgcaaatactttttgaaaaaatattacttatacgcgtggtgctagttaaatcgttttagttaataaaaaagtccaatcttgttagactcgacttgtaaatagtaataatagaaaagagtctgatctgattgaactgccttaagcttaagcgttttagccaccatttacaagttagttttaaagatttagtgataatttgtcggcactggtatcgtttgtatgcaccggctgagtttactcatcggcgaaatattgatcaaattaaaactacggacagtctgattttggctttacttatctggcaagctaagacaggaattgaatcacaaagaagattctgtgaatgtttcaattgtttatcacactcacgttttaatcggcgttcacgtcagctattgcaattgatttatcagatacggcaagaaatgaataaaaaggttgacctgaatggacagttcttgatcattgacagctttccggtacctgtttgccaaccaattcgaaactatcgtgctaaaatttttcgcggttatgccaacattggttataaggccaccaagaaaatttacttctatggtttcaaagttcatgccattgttagcgatgacggttacattcttgattatgtcgtaacaaaggcatcagttcatgatgccagggagacagttgaactgatagaaaatacccatccatctaattactatcttcttggcgacgaaggctatttaggcaaagaactgcatcaacagctaaaacaaatgggttacgaactttggacaccatatcgtaaaaatatgacaggagctaaaaagcacaatgatcatcaattgatggctattcgcagaacaattgaaagcgacttttcgcttctgacctattacaatgccgagaacaatcgagcacgtagtctgataggctttcaaagccggttggaaattgcaattttagcttataatttggcttattgtctagaacgatttaactagcaccacgcgtattacttatctgtttttaactaagttaattttagttattgtaccgaattaaaaaaattgctataatatcttcaatttaattaaaggagatttcacatgagattacgtactattgctttctaaatcaaaatcttaatattaggaagcgagaaaaacatgccaaaatttaatatcagagaatatcaaccaaacgattatgctgaagtatgtcgcattcacgacgttagtcgtaaagaagagctaacaattggtggtgcggaaaaatacttcatacctttagagacagctccatataaggatgattttttctcctgcaaaatttatgtagcttatgatgctgacagcatattgggcttcgttgcagttcatccccaagaactggattacatttatgtagatccaattcatcaaaataaaggtatcgggtatgctttagcaacgacagctttgagatacatgagtcgaccagttagtcttgatgtatttgcagaaaatactaaggccaaaaagctttacaaaaaattaggctttaagtgtcaagaagttagatatcagcaatgggatttaaatgatcctaaaaaatactctgatgaaaaaatgattctcaattaaaaaatatataaacacaaactcttatccatgcttaaaacatagataagagttttttaatttataagattacttattttctttattcttcttttccatatcagccttaacttcagcttctacgctttcaacacgttctggacgcattgttgggaagagcaagacatcacgaatagctggagcatcagtcaaaagcattaccaaacggtcaataccgatacccaaaccacctgtaggtggcataccgtattccatagcacgaaggtaatcttcatcgatcatgtcagcttcgtcgttacctgcttcacgttcttccatttgagcttcgaaacgttcacgttggtcgtcaggatcgttcaattctgagaaggcgttaccgtattcttcacccatgatgtagatttcgaaacggtcagtaaagcgtggatcgtcagcgttcttcttagcaagtggtgagatttctactgggtgaccgtaaacgaaggttgggtcaacaatagtttcttcacagtacttttcaaagaaggcgttaataatgtggccaaccttccagaatttttcaacgtggatgtcgtgatcttccgcaatcttagttgcttcttcaagagtcattggtttccagaagtcaacgccagtcttttccttgattaaatcaaccatgtggacacgacggaatggcttgcctaagtcgatatcagtaccttggtaagtaatcttaccgtcatctgaaacaaccttagcagcagcacgaataatgccttctgcttcatccattacatcgtggaagtcccagtatgcagcgtaactttcaagttcagtaaattctgggttatggtgagtgtccaaaccttcgtttctgaatacacgaccgatttcgtaaacacgttccatgtcaccaacaatcaaccgcttcaaaggaagttccaaagcgattctcatgtaaaggtcaatatccaaagcgttgtggtgggtaataaatggacgagcttcagcaccaccagggatgttgtgaagtactggagtttcaacttccaagaagttttgcttgttcaagtagtcacggattgcttggataatttgagtacggtgaacaaaacgcatgtaactgtcacggttagtgatcaagtcaaggtaacgttgacggtaaattgcttcaacgtccttcaaaccgtggtacttatctggcaatggacgaagagcctttgataagaaagttacgtgaagagctctaatagtaagctccccagtatcagtcttcataacttcaccatcaatacctaagaagtcaccaatatcagacttcttgaagatcttgtagttgtcttcgccaacaatatccttacgtacataaatttgaatcttaccagtacggtcataaagatcagcaaaacccaccttacccttaccacgttttgcaagcatacgacctgcaattttggtcttaggcatatcagcgtttaattcttccttatcttcattaccatacttttcttccaaagtacttgccaaatcttgacgatcaaattttcttcggccaaatggttcaattccgttttcacgtaattcttccatcttctggcgacgaactattaattggtcattcatttcattctttgccaatttacttttcctccatttatttgttcattgtcgcgcgtcgtgcagcacgagcttcttctcttttttcatactcgtcaacaaaattatcgagcaagtcatatacttcttgacgcgtccagacctcatttattttagcacgagtacgggccgaacggagaattccctttaaatagtatgcagcttgctgacgaaattctggtacagcacgcttttcaccgtgaattttaacaagtgcgtgaagctgatgtttagccgtttcaaccttctcacgaacagtttgcggcttcaatttttcaccagtttccagatagtgtaccatatctttcaaaatccaagggttacctaaagcagcgcgaccaaccattactgcagtacaaccgatctcatccaatgcttttttagctaattcgggtgttctaatatcaccattagccacaaaaggcacatctagcacctgggcaacatcatgtaatacttcccagtcagcttcaccttgatacatttgtttacgtgttctaccatgcatcgcaatcatgcttgcgcctgcttcttgagcagctaaagcattttctacagcaaaaatatgctttttatcccagcctgttctcattttaacagaaaccggctttttaacgttctgcactactgcgtgaaccatctgataaatcttgtttgaatcaagtagccacttcgaacctgcatcagtctttgttactttaggtacgggacaacccatattaatatcaataatatccgcatcggtatgttgatcaatatattgagcagcttgaagcaaagtttcctcgcttccgccaaagatttgaatgctcattgggtgttcacgcggatcaacatccatcatacttaatgtctttttatttccataaatgatcccatgatcagaaatcatttcgcagacaaccagccccgctccgaattccttacagacaacgcggaatgcagagtttgaaactcccgccatcggcgcaacaacaactcggtttggaatggtgatatcgcgaattttccagctgttattcaccaaatcatcctttcaaaattaccctattatgatatcaaaaaagccccgctggttaaaaccttagggctttatttgccttaataatctttatctttgttctttttagctaaaatatctttcaattcatcttctgaataatgatacttgttaccgcagaaattgcaagtaagttcggcaccatgatcttcattaatcattgcttccaattgatcgctcttcaaagtttccaaaataccagcatacttttctttagaacaatcacagttaaaggctacatcatctttttcaagaatcttacaatcggttcctaagattttacgtgctaagtcttctggtgtcattccatccaaaaatgaagttgagagtgctggcaatgcatcaattcgcttaatcgtttcatcgatcaaagcatcactagcaccaggaagtgcttgcaacataaagccaccagcttcaccgattgaattatttggattaacaaatactgacaaaccaacagctgacggaatttgttctgacttagtcaaatagtaagcaaaatcttcagcaatttcaccagaaacaattggtacctgacctgtgtatggttccttcaagccaaggtccttagttacttcaaaccatccttgtccaacagcctttttcacatcaatatgaccatttttcttaggtggtaaagcaatatgtggattcttaacataaccctttaccttcaaatcggaggtagctgtcacgatggttggaccaacagggccattgcctaataaacggactgtcaattcttccttatctgtcaattctgcaccagcaagtaaaagagatcctactaaagtacgaccaagcacagcagctgaagctgaccacaagtcatgccgcttttgtgcttcactcactacacccttagcggtaatggttaacaagcgtaagtttttagtcttatcaattgactttactaaataatcactcatttttatccttcttttctaaaaaaatagagcctgtgacaggccctacttttatttaattgtctttatgctcatcatctgcaggagtatcttgagttgaagtttcattttctgattgatccttttcgggattctcaggattattttcttcaacttcatgattcttttcagatggagtctccaaggtatctttttcttgatcagctaatgcttgatctgaatcctttttttctgccttttcaacttcgcgcttctctgcagcagccttagcttcttcataagttgaagcctttgattcactcggatattcatcttcgtctttttcaggcatcttaccggtcttatacaaggccataatttgcttttcattcaaggtttcatacttgagcaaagcttcggcaatgattctatgcttttctttgttgtccttaacgatctcaagggccttagcatgagcttcatccaaaatcttctttacagcttcatcaattttagctgaagttgcttcactatatggcttaaagccgtaaggattgctttcgccttccttttcaagctcaaccatacctaaggattcggtcataccatagttaactaccatgctatgcgcaatttgagtagcttgttcaaagtcgttagaagcaccagttgacttatcaccaatggttgcttcttcacctgcacgaccacccatcaaaccaacaatttgttcaaataattgctttttagtcaaaatgaattgatcatctttaggcaacatgatgttataaccaccagcacggccacgaggtacgatagtaactttacgtacagtacgtgagtcgcttaagaccaaaccacagattgagtgaccagcttcgtggaaagcaacacgtcttctttctttttcagaaatcaaacgatccttcttagctggaccggcaatcacacggtcttcggcttcatcaatatctgatgcagtaatctcagtaccattacgacgagcagcaactaatgcggcttcattcaagacgttagccaaatctgcacctacaaagccaggagtttgacgggcaacttccttcaaatcaacatcaggtgcaagtggcttgttcttagcgtgaacctttaaaatagcttcacgaccacgaacgtcaggacgacctaccaataccttacggtcaaaacgaccaggacgaagcaaagctgggtctaagacgtctgaacggttagtagcagcaatgacaataacaccttcatcgccttcaaaaccatccatttcaaccaataattggttcaaagtctgttcacgttcatcattaccaccgccggtgccattgccacgacgacgaccaatggcatcaatttcatcgataaagataatacttggtgcatttttcttggcattgttaaacaggtcacgtacacgactagcaccaacaccgacaaacatttcaacgaagtctgaacctgagattgaataaaatggcacgttagcttcaccagctacagcacgagcaagcaaagtcttaccagtcccaggaggaccctcaagtaaaacaccggatgggattcttgcacccaacttagtgtacttagatggatctttcaaaaattcaactacttcgactaattcttgtttttcttcttcttcaccggctacgtcagagaaacgaaccttattcttagaaggatcttctggcttgacgtgtgaacgaccgaaattcattattccgccgccaccaccacgtccagcgccaccttggttcatcatcatccaaagcatgacgataaacaaaacggttggcacaagcatgacaatggtcgaaatccaattgccagattgtgattctccttgagttgtcatctgagcattacttttttgtgccaagttttgcacgttagaaacggtagaatcattctgtaacatggtagtagagaagcgcgaaacttttctacttgaattattactaaagaaatcaaaactattatttgattgattctttgttgtttgtgcagtcttgtaactacctgaaacagtgtaaacaccattagcaggttgaacactaaagtttttaactttgccttgacgcaaatctttaacaaattgtgagtaactgatattctctgagctaccactattgttagagccgccgagtgcccagttgattccccataggagcagaaggaacacaactatatagaaaaggccgtttgaaagcagccgattccggttattcttcataaaaaacctccgcaaagtctttaaattatacgtttaaaattctatcacaaattagcttgcaaccactaacattttcacctattttgaagactttttaataaatgtataggaaataatgtttaccatctgtgataaagtcctgtttttgataacatttttctacaaaaacaggttcattttcagcataaattgaaatgcagcaagagcgcaaggcaaagggaattgccttttctgcaaatttctttttcgccttaactcgttgaccatttttcaacaataatttgctagcaggtactagacttcccgcagtaaaatgtgcatccctttccagccaaaagcttcctatttctttcaaatcagcttgcctatcagtagttagtaaataataagctccgttgaattcaaattgctgattcagttcgatactaaatggctgcacaattttctgtggcttattttcaactaaataactataaccttgataatcaatcacctcaaaattgcccaaattttcatttacccggcgatgatatttttgccagattatcttttgccaaaaaatatttttttcttctgtagataaatcttttaagttgtccgttttaattcgccaagcaccccaaaatggctcaaccgttctcatactattcaactgctcatccgccaaatccgtcaattgactcattttttcactaaaacgcagtgcattactaattaaattaggattctcctcttttaataatggcaccacatgatgacgcagtcgatttcgaacagtctcatcctccgtattagttgaatctattacatagtcaatttcacgctcttgatcatattcgagtaattcttgcttactataggctaatagtggtctaagcaaaacaacgccatgcatagagccgatatcttgcaaactattcatctcttcaggatttcccgagcgaataaatttgagcaaaatattttctagcaaatcatcaccatgatgcgcagttaataaatagttcattcgctcgctatgagcaacattagtcaaaaaatgatatcgtgcctctcgcgccgctgcctcaattcccgtttggggctgatcatgtttatcccacttgccattaaacaggcaaatcttcttttgagcacaataattttgcaaaacttctacttcatatgagctatccgcacgcaattgatgatcaaaatgtgccgcaaaaacagtaaaacttagttgtttttgcaaattaactagcatatctagtaaagccatggaatccggtcccgcacttgcggctactaatagtcttttatcctttaagtcaatctgatgttgttcaaaaaaatcattaattttcattatttttctaacaaaaaatggccctttcggaccatcccttaattctcagttaatacttgctttagcttttcaatttcttctttagcatcccgcgttgtttgattcaggacttgatcaaaatcagctggctttgtcttagaaaattgattatcatggtcaactaattccggatcattcactcgagtgatcgataaattaaatctccctttatggatgtgcaccacaaccacgcgcacttcatcgccaacatgataacgacgacgttcgcgtagccaattattgccaaagtcactatgatgaaccaaaccagaatgccgattaggtaaagtaacaaagatgcccaagtcagtaatgttattaattacaccagtcacccgattaccagcttgatacttttccattagttatcatcatttctttcatgcacgttataaatcttctcatttgatttagaataatagaatttataacgaatcagcttagcaacataatttggatccttcaaatcctgcttttcagtttctaagtcatttctcttattttttactttagttaaagtctgtttttcagcttgtacttgattattcagtcgtccagtttgagaaatcttgattgcaatctgtacacctaaagcaacgaaaatgatagcaaaaactgccataattacgttcaaccgcttgcggtgtgtttctttctctagtttagcctgtttacgtctaagacgcgccctctgctcttctggactcaacgaattatatatacgtggaccatgattcattgtttaatcccctaattactaaataactatactaagtcaagtataacaacgatttaatcaaaagtcattaatcaactagctcgtacagttcacttgcttctgcttttttcgtggtctcgcgaatatttaacaccttagccttgatggttttggcgccgtaacctacttcaataatatcatcaatttttacatcgtagcttgattttacaactcgaccattgactttgattctaccttgatcagccatttctttagctacggttcttctcttaactaatcgtgaaacttttaaaaatttatcaatcctcatatttttctcctacagttacctttgtacaatgtcgcttgctgcctgtaaaaagattgccagttcattgaataaaacacgattcttcattttatccggcaacaatagcaagacaaccattcttttttcttgattcatactaatgcgagcctttaagcttacatgctccaatgccttaaaaatattaggtccctcaagttcgcgtgaagctgcattcgtaaattccactttaatcttatcgtcagttttaaccacattgagcacttgagccatgtcagcatcaacctttagaccggcaacagctaataaattctcgacggccgttggatagtcaccaaaacgatcgattaattcatcttcaattttacctaattcttcctgacttgagacggctttaatctttttgtaaaattcaattttttcttcttgatcaccgatatacgaatctggaatataagcctcaagtccaaggtcgatttctgcgtttgactttttgactgttgtcttccccttacggtcttgaattgcatcagccagcatttgtgagtacaaatcataaccaacgctatcaataaagccgtgctgttgtgcacccagcatatttccagcaccacgaattgataagtcacgcattgctattttgaaaccagaacccagttcagtgaagtcacggatcgcatcaagccgtttttcaccaacctcagttaaaactttatttggcttatacaagaagtaagcataagccaaacgagcactacggccaattctaccccgcaattgatacaactgacttagaccatagtggtcagcatcttcaatgatcattgtattgacattgggcatatcaattcctgtttcaataatcgtagtcgtaaccaagatatcaaactcgcgattcaggaagcgataaagaatatcttccaactgattctgactcattcgaccatgggcagctgcaattcgcgcctgtggcatcaattcctgcagtttttcgacagtttcatcgatatcactaatccgattatgtaaataaaagacctgtccatcacgttgcatttcacgcaagcatgcatcccttactacactaggaatttgttccatcacataagtttgaatagggtatctgttttgaggtggcgtttccattactgagagatcacgcacacctaccattgacatatgaagcgttcgcggtattggcgtagctgttaatgtcaaaacatcaatatttgccttcaactgctttaacttttccttgtgcttaacgccaaaccgctgctcctcgtcaacaattaacaatcctagattcttgaattttacatcttgagacaaaatacggtgagtcccaacaaccaaatctatcttgccattttttagtccttcaataatttcctttgattcaactggcgtttgaaaacgagatagcatagcagtattgactgggaaatctttgaagcgatcttgaatcgtctcatagtgttgttgcgccaaaatagtggtgggtactaaaaaggctacttgtttattatcctgaattgccttaaaagctgctcgtaaggctacctcagtttttccaaaaccaacatcccctactaaaagacggtccattggcttcgagctttccatatcttgcttaatttctttaaccgatcgcaattgatcaggtgtttctggataaggaaaggcatcttcaaattgtttttgcagatcatcatcaggtgaaaaagcaaagcctttttctgattcacgtttggcataaagctcaatcaaatcatccgcaatgtcttcaactttagattgaaccttacgcttggttttagcccactcactaccacctagcttattaatatgtggtgtcttaccttctgaaccaacgtatttttgtactaagcttaattgatctgctggtacaaaaagctgatcaccatgctggtaggtaatcgtaatatagtcacgcttggtaccattattttctaaagtcttgattccttcaaaccgaccaatcccgtggttaacatgaacaacataatcccctggcttcagttcagtataattgcgcaaacgctgggcattctccagtgtcttaattctttttttacgttgtgggcgcttattaaatagttcacgctccgttagatataccaatttaactgttggtaaactaaagccactaacaaagccatcaactacaatttgtgtccgttgttcaacaatttcgtctgcaccaacaattggtaaatttaagccaaaatcaaccattgtttgatcaatttgctgtgctcttttttcattatcagcctgtaaaatgacggtttgccccgccttttgataagattctaattctgacttaatcagcggcatttgactaaagaattgttctggctcacgtgttgaccaattgagcatctggcctaatcgcagtcgtcccatgcttcgttgaaacaatgagaaataaatacgatggtgcttatctttgctcagaatctttgtataatctgaccgcaagctttgccctggcaacattgcaccagtttttagttcatcattaataaaagcagcgttttgcttatcaactgtttcaaccgcttgattaattaaaggcaaatcgtcaaataaaatctgcccatttttaggcaaatattcgagtaaactactagaaatttcaagcaaatagtcaattaagaaagcatagtttttaggtaaaccgccatcgcttaattcatcaagaactgccgcaaagtggtccttgacagctttagcgggagctggtgcattggccatatcttgttcaattttcttagccgctgccgcaattgcatccttagtaaaaactcgatcttgagctgctgcaacttctactttgtctaactctttttgactccgttgactagctaaatcgaattccttaattgtatctatttcgtcaccaaagaattcgattcgcacgggattttctcgatctagtggataaacatctaaaatatcaccacggatggcgaattcgcctagccgtactaccaaagaatcacgctgataccctgaagcaagcaaccattcattgagttcttttagttcatattcttgacctggctcaaaactccgctttgcctgcgtaaaatcagttggattggtcagtttgtattgcagcccctgcggcgttgttaccactattcctgccttaccacttaacaaaaaattaagtgcctgaattcggctactcagttcatcaggcgaactaactgccgtttgcgttgcaattgtagcatctactggaaaaatttgcacagtttcatctgccataatggcactgagttcaccatataagttttgtgctttactttcgttttcttcaattaaaataagtggagctgctaatttagttgttatctgttttagcaatagactaaaagcaccggcattagcgccagtgattagtgaattttttacttgttttgtttttgaaataaaattatttaaatcttgatctttatctaaaatctctgttaaacgcattttaattatatttattcattaaatattgactaccatgtccgctgataaagtcgtcaataatatctacacttatcgcaaatgcatcatccatcaatttttgttgttcatcattaaatggtgtcaaaacccatgaaacaaccgttgcatttttcggatgacgaataccaatcttcaaacgattaaacttttccgtccctaaatctcgaatgatgcttttaattccattatgtccaccagatttgccattagctctaattctaattttaccaattggcatatccatatcatcttgaataattagcacatctgctggatcaaccttaaagaagttagccacttgactaactgaacgacctgattcattcataaaggtttgcggctcaagcaaaattacatcttcaccatttattttttgcttagtccaatgaccttcaaatttatctttatccagtgacaaacccttttcattcaaataatgatccattgtcatgaaaccagtattatgctttgttttatcatatttttgtcctggattacctaaacctgcaattatcttcattatttttactcctcactatgcacacaatcttacatataatagcacaattaggaaataataattttattaatgcttgctatcatggtataattcattttgttaaaaatatcactaataaaaaaggagatttttatttatgccaagagatgaaagacctcgtaaagttattcttgttggtgatggtgctgtaggttcaaccttcgcattctcaatggtacaacaaggtatcgccgaagaattgggtattattgatatcgctaaggaacacgttgaaggtgacgcaattgacttagctgatgctaccccttggacttcaccaaagaatatctatgcagctgactaccctgactgtaaggatgcagacttagtagttatcactgctggtgctccacaaaagccaggcgaaactcgtcttgaccttgttaacaagaacttgaagattttatcatcaattgttgaaccagttgttgaatcaggctttgaaggtattttcttagttgttgctaacccagttgacattttaacccacgcaacttggaaaatgtcaggtttccctaaggatcgtgttatcggttcaggtacttcacttgatactggtcgtcttcaaaaggttatcggtgaaatggaacatgttgacccacgttcagttaatgcttacatgcttggtgaacacggtgatactgaattcccagcatggagctacaacaatgttggtggcgtaaaggttagtgactgggttaaggctcacggtatggatgaatctaagcttgaagacatccacaaggaagttgctaacatggcttacgaaatcattaacaagaagggtgctactttctacggaatcggtactgcttcagcaatgatcgctaaggctatcttgaacgatgaacaccgtgtacttccactttcagttcctatggacggtcaatatggcttacatgacattcacattggtactcctgcagttgttggccgtaagggtcttgaacaaatcattgaaatgccattaagtgacaaggaacaagaattgatgactgcttctgcagatcaattgaagaaggttatggacaaggcatttaaggaaactggcgttaaggttcgtcaataatctaaaacttgtttcatctaaaggcatctcttttttagagatgcttttttatttgtctaactattgttaaaatatagttgttacttcagatgaactttaattaatatttaattaactcatcaactatgctataattacttgaaacatttctcactttcggaggcgaactcatgcttattaaatctttagttattaaaaaagattatttaacaacagttaatgaaaaagccacattagcagaagctttaaaagttttagaagattcaggctacagatgtgtgccaatcgttgacgatactggtactattttccgtggtaacatttataagatgcatatctaccgtcataagtcacaaggtggcgatatgaatctaccagtaacttacttacttaagaatgccactaagacaattaaggtcaattcaccattcttcaaggtatttttcaacattaaggacttgccttatattgctgtccttgatgaagataatcatttttatggtattcttactcactcaagaatgcttgatatgttgtcagatgcgtgggatgttaaaaatggttcatacgttttgaccgttttatctgacaatacacgtggtaacttgatcaagatgtccaagattgtgtctaagcacactaatatgtctagtgtaatgacacttgatgcagctgctggcgaactcgaaggtaattttgttagaagaacactctttactctccccgctggtgtctcagatattaccatgagaacgattgttgataagttacaaaaaaaaggtttcgtagtttctgaaatcgaagatttgcaagccggcatgactattatgagtgatgaaaatccaggtgtctttattgaacaccctgttaaggattaaaaaactgatctaccaaaaaatgcttctagatttttgttctagaagcatttttttattgcctaacttatttttcatagtaaacacgaggtaaacgatcgtttaacaaacatgctacttcatagtgaatagtatcaacataatctgcggcggccttaatattatttggcgctgttggatcattggaaatgatgactaccttagttcctaacggcattttctttggcattttgaccataaattgatccatacaaattcggccgacaattggacagtattcgtctccaagtttaactttaaagccttgaaactttctaataaagccatcagcatagccaacaggcacagttccaataattgtatcttgatcagctacaaaggtagaaccatatcctactccgtcaccttcatgaatagtttttacatgagttagttcactctcaaatgataatgctggttcaagcgaaattgatgacttcaagtcaggactatcaggattagaggatgggttcaaaccataaatgccaattccaaaacgaacacaatcactaggcacatccttgttaaagatgctggcagcggtattgtctacgtgaatccacttaggcttaactgtcaacaaacttctcatatgagcaaatttttctacctgatgcttaaagtaagtatcatcagcactgtctgcagaagcaaagtgtgcgaacataccctctacgtagaaattatcgttattttgtaagaatttattagcagcaataaaatcctcatcttcgttaaagccgatccgacccatgcctgaatctactccaatatgaactttcaactgtaactgctctttttcaaggtacttttctgcttcctttagccattcaaggttaggaatcgttaatgaaacattgtttgcggccgcaattggagcgtattctggagaaactactcccaaaactaaaattggcttaacaatgtcagcatgacgcaattgcaaggcctcatctaaaatagctacacaaaggcctgctgcaccttcctcaatcgcaattttagccacctcaactgcaccatgaccataagcattggccttaactacagctaacatcttttgccctgttgcaagatgtttcatttcgttttttatatttcttctaattgcgcccaaatttacctttacaacggctggacggtgatagcctggaaccatatttttatttttcctccaaaactacaaatgtaataatttcatgattatcatgtgtgatacttgggaaaatatttccatcaaacttagttgaagtcataacgggatgacctaaatcatcccataaagtttcgacatcttgaaaaccaatatactttcccagacccgttctcattgctttagaaaaagattcctttaatgaaaagcgtccgcctaggtattcaactttacgtttgcctgccattttttgatattgatcaaattctttgggagttaatacttttttggcaaaagcatcccccttgtccacgatcttcttaactcgttcaacttcaatcgagtcaattcctactcctttaatcattattttcacctcacacaatgacatcattataatacaaaaaagaagctgtaaaaattacaacttccctttttaagataaaatcctaatctttcttattcttgattacaaattcatgtccgttgccacgaccacgcttaccgcggtttccattttggcggtatgaattattgttactacgacggcggtggttatcgcgtccatgattattattgctacggccatgacctttaccacgacggcggcgaccatcacccttgtatggtaacggcttttctggggtaatcttgactttaacctcatctttagccaagttctttaaaaaggctgcaactaagtcgagagctgaatagttatccagcagctcacttgccccttgggtatatttacccaaatcaccgttcatcaaatcttcaatttcaatttttgcttgctttaattgaccatgtaatgcctgatcatctgttggcggacgaagcggcgacatcttctttttagtcaattgctcaatggttctcatatagccaatctcgtttggcgtaacaaaagtaacagagattccattttgccccgcacgaccagttctaccaatacggtgaacatatgaatccggatcttggggaatatcataattataaacgtgggttacgcctgaaatatcaagtccgcgggcagctacatcagtagcaaccagaatatctagcttaccttcacgaaatcttttcaaaactgacattctacgcgcttgcgatagatcaccgtgaattcccgccgcattgtagccacgcgcttgcaaaccgcgcgtaagttcatctacgcgacgtttggtgcgaccaaagactaaagccaaatctggaccctgcacgtcaattagtcgacacataatatcaaatttttcagactctttagcacgaacaaaatattgttcaatcaaatcagcagttaattccttagctttaatgcggacaatttctgggtgatccataaatttttcgcctatccgcaaaattggcttaggcattgtagcactaaagagtaatgtctgttgtcggttcttagcatatttcaaaatactttcgatatcttgaataaaacccatatcgagcatttcatctgcttcatctagaacgacagccttaacttgatctaaattaatagttttgcgtttcaagtggtcaagcaaacgccctggcgtaccaactaaaattgatggtacatggtgtttcaatgagcgaatttgacgaccgatatcagctccaccatagaccacttgaacatgagcatgttcgtcacgacctaaacggaataattcttcttgcgtctgaatagcaagttcacgcgttggttcaataataaccgcttgaattgctttttcttttttgtcgatcatctgtaaaattggcaagccaaacgcagctgtcttaccggtaccagtctgggcctgaccaattacatctttgccttgcaaagcaaggggaatagtttgttcttggattggagttgcttcttcaaagcctgaacgtttaatcgctttaagaagcgcatcatttaatcctaattctgaaaatttcaaaaaaatttttctcctatctcagtcgggctaagacattttctaggtgcattccatgcgaacctttcaatactacaatgtcatccgacttaatatcgttcttcagatcatcaatcattcgatctgtttgttcttgtgtataataatgcaaatgttctggctcatatttgccttgtaaagcatcatataaattcttcatttcagagccatataagtaaacttcgttaataatctggggatccattgtatctgcaagaccagcatgcaattccggcgactttttacctaattcaagcatatcacctaaaacagcaattctacgaccaccatcttttacttcaacttggccaaaactagtcaatacagctctaacagcagttggatttgagttatagatatcactcatgatgctttcgccagcatcgcctttttcccactccatccgattagccgttggggtaaagttagacaatgatgaggcaatttcctcatcactttcaccaaaatgacgaccaacactaattgcggccattgcgttagaaacattgtgtttaccaatcattgggattgagaatttttgctctgaatcattaactgtaaaggtagcatgatgcatataactcttaaagccagttgcatgaactgtatcttcatctctaaaaccaaaagttgctttagcttgatccaatttctcagcacgttcttgcaataatggttcatccccattgaagataaattcgccatcttcacgcaaaaagtcagtaatttccatcttagcatctgcaatcttgtcgcggctgccaaagaattcaatatgagcttcaccaatcattgtaattacggccacatctggatgggttaattcacttaaatgatgcaattgacctggtctgtccattcccatttcaagcaccaaaatttcagtatttggcttcatctcaagaatggtcattggcacaccaatctcattgttaaagttggcctgagttttatgtacattaaagcgtttagacaaaacagcagcaatcatatccttggtagtagtcttaccatttgaaccagtaattcccactacggttggattaaccttacgcaaataatagcgagcaagctcttgcatagcagcaagtggatcatcaacttcaataaccgcaatatcttctggcttgttcggatgcccctttttccataaagtagcagaagcaccattattaatagcactagctatgaattcgtgcccatcacgttcaccttcaagtggtacaaataatccaccatctgtgatctttctggagtcaaaggcaacagaagtaataacagtttgattgtcaccttcacaagtagtatttaaagccttggcaatttccgccatttgcattttcattgaatatttactcccataaaaacatttttatacagaaaacattatactgtctttcatgcattctgccaaataatctctaacgaaaaaagcagccccaatgggactgcttccaccagataaaaggtttacttcttcaagccgtacttcttgttgaacttttcgattcgaccatctgcttgagcaaacttttgcttgccagtgtagaatgggtgtgaatctgatgaaacttcaacacgtactaatgggtaagtttcgccttcgtagtcaatagtttctgatggcttcaaagttgagccagctaagaacttagcaccagttgctgagtccatgaaaactacttcttgaaattctggatgaataccttgtttcataatttattactcctttgccatgatcatatcacagatcatagattaatcgattaacgataactagaataacatcttcaagttagtaattcaagttctttttaattttagcttatctaattgccactgcaaatgcttcataaggcttaagcgtaatatcatgcagatcattacgcacagcataattactaagcaagttttctttaatgcgatcggtcgccgtaaactgttgctcttcaccagataggttagcaaccaccaaccacttttcagtacctaaaatacgataatatgcaagaacttcatcaccagtatcatgaaccaacttaaagtcaccattaaccacaatctcattttcatgacgtaaagtaatcaattcttggtaagtataaaaaatcgaattaggatcagccaaggccttcttcacattaatttctttgtagttaggatttactgtcaaccatggctttgacttagtaaagccggcatttttctcatcattccattgcattggacgacgagcattatccctgcctttaacattgatcgcatgaattagtttatctttgtcataaccttcagccagacgttcatgatacatattgacactttcaatatcttctacttcatcaatattttttaccggacaattagtcataccaatttcttcaccgttaaaaatatatggtgtgccgtgcatcaaatgtaaaactgtcgcaaacatcttagcacactgcacccgatattttttatcattgccccaacgtgaaattacgcgcggaatatcatgattttcccagaacaaactattccaagcatgattaaaatcaagctctgtctgccactttactaaaacctttttcaattcgcctaagtctagcggctttaaatcccacttttcttttccctcctgctggtctaaagcttgattctcaaattggaaaaccattgataattcatgacgtgctggatctgagtactcttctgcaatcttcggtgtcgcattccaagtttcgcccaccgtcatcacatctcgatcaccaaatgtattcttgttcatttcttgcaaatatggatgaagcatcggaccattttcacggatcattttgtcgggatctttaccaattaattcaatcacatccattcggaagccaccgatccccttatcaagccaaaagttcatcatatcgtagattttttgccgcaactctggatttttccaatttaaatcaggttgttgttccgcaaagaagtgtaaataatattgtcctgtttgctcatcaaatttccaagctgaaccagaaaaagcagacttcaaactattgggctcatgtccatcaacaggatcacaccaaatataatagtctcggtaaggattatccttactttttcgtgcctccacaaaccattgatgctggtcagatgtatgattaaccaccagatccattacaattcggatatgatgctccttagctttctgaatcaactcatccatatcagccatcgtgccatattgcggatcaatcgcttcataatttgaaatatcatagccattatccacaccgggagattgatagaccggtgaaagccaaattgcatcaactcctagattttccaaataatctaaacgagcaataattccttgtaagtcacctatgccatcaccgttgctgtcctgaaatgacttaggataaatttgataaacaactgcttttttccaccatggtgtcattttttctacctcgtaaatttcaaatttattgttaaacataatataaataatttgtgtaagcacttgcaagaaatggtaaactgttaacggtatcaaattttagtgaggtaattagatgactactcttcccttcaaggccgttgctgtagacgttgacggtacttttgttaacgatgaaaaacaatacgatcatcaaatgtttagcgagattttaactcgtctgcatcaacacggggcacattttattattgctagcggccgcccagctggccgtttggctgatgactttagcgaatttatcgattctattgactttgttgccgacaatggtgcggtcttagttcgcgatggaaaaattattcgtacaacaagcttttcaaaaaaatgcatcctaaattttattgaatatttgcacgcacgctatcctggtgcagcccaaaacattttaatcagtggcgttaagcactcctactttttaaaaagtacaccaccagaatacaagcggtcccatcattatttttatcctaatagcatcgaaattgatgattttaataaaattcctgctgatgaccaatacactaagatcacaatggactatcccagcaagattcgacatgaattagaacatggcttcaacagccgtagtacagaaaaaatccacgtcacaactagtggttggagctacatggatattattcctgaaggtgtaaataaagccgcagggctaaaggaatttttagcttatttagacgtgccaagaagtgaattaattgccttcggtgatggtgaaaatgaccttgaaatgttgaaatttgctggtttaagttatgccatggctaatggtcaagatatcgttaaaaagactgctaaatttattgcacctactaataacgacaacggtgttttcaaggtactaaataagtatcttgatgaagcagaatagcgaacaaaaaactgttgagaccaaaaatcccaacagtttttttacttattctttattttgcgcaattttttcagcataaggatcgattttctttaaccctgtcttaattccccaataatagaaggcgagagaaataatgataattactacaaagtcaaatggatacttaatccagttctgaccaccaaaaccgctactgcccacaaaggacataagtgacataaaaatcaaataaccgatcatccaccaactactatgtaattgttcttttaaatttgaatgttggtagtgaatttcataataaaaataaatcggcaaacccaaggcaataacaattatcacctgaatagtcgttggccacattgaccagtaaattgccaaactagttagtataaaggtaactggagctagccacttcatataaccaggattaaatggacgatcaagatctggtcttttctttcttagagtcattaccgtaactggaccagtcaaatatgcaatcaaagttgaggccgtgattactgttgctagtaaattccagtttctaaataagcttactaaaataaccgccaaaacaaagtcagcaatcatcgcataacgtggtattaagtatttttgattcaatctacctaaccattttggcaaatgacgtgtgtgtgtcattgccgctagggctcttgaggccgtagctacaaatgctacccctgtcccaaatggtgaaacaaatgcatctaggtagagcaaaattactagccaattaatgcctaaaataatagcaatgtccgcaaatggtgaggtaaagttgatcccatgccagcctactttagctaacatgcctggctcaactgcaccaataaatgtcacttgcaacataatgtaaattgccgcagtaattaacattgagatcaataccccacgcacaatattcttacgcggatttttcaattccccacccatattgatgaccgtctgaaaggcatcataagacataataattcctgaaacagaagttgcttcaaagatggaccgactaccataaggcataaattcatgtaaattactgccaaagttttgtccatgaaaacctgaagcaattaaaactataatcgtcaaagtaggcaataagatcttaaaaatagaaatcaaattggtaaaatgggtcatgattttaactgaccaaaaattgatcattgtaaaaatcagcataaaaataataaccacacctaaaccagcaaaagtaatactgccgtttttaataaaatttttagtccagttagcccagctccagggccaagaactcatatattgcacagcagctacggcttccattggtaccaatgtgactagcgaaatccagttagcccaagcagccacaaaacccaataacggtccatgactatattgagcgtatcgactcatcccgccactttcgggaaacatcgaacctaattctacataagtcaatgcaattgagataataattactgcacctaaaatccaagataaaattgcggctggacctgcaatttgtgctgcagaacctgaaccaaaaagccaacccgaaccaattaaagaattcaaggccagcataatcgctgaaaataagcctattttatgtctttttaatttttccaaataatcacgtttccttcactcttaactccattatttttaattttttattataacaaaagccgccccagctgagaactaggacggctaaattctgctacacaaattattcaattggatgttttttagttaatgcctgaacttcttctttaacatgagcaatcgttgcggaattttctggatcagataaaatttcaataatcatttccgcagtcttcttagcatctgcttcatcaaagccacgactagtaattgctggcgtaccaatccgcaacccactagtaacaaatggtgaacgttgatcgcctggaattgattctttgttggtagtgatgtgaacagagtcgagtaaattttgagcatctttaccggtaataccagtcttagtaatatcgataatcatcaaatggttatcagtaccaccagatacgacacgaatattgtccgattcagcaaaagtttctgccattgccttagcatttttaatgacttgcttaatataatctgtaaattgtggttgcaagtcctcataaaatgcttgcgctttacctgcgatgacatgctcaagtggcccaccttgaatgcctgggaacaaagcgaaattgattttcttaccaatttctaaattgttggacaaaatcatcccaccacgagggccacgcaaggtcttatgtgtagttgtagttactacatcagctactggaacaggacttggatgttgaccggttgctactaagccagcaatatgagccatatcaaccattaagtatgccctaacttcatctgcaatttcacggaacttttgccaatcaatgatgcggctgtacgcagaagcaccggctacaattaacttaggtttaaccttaagagcaatttcacgaatggcatcaaaatctagttcttcagtctcaacatttagaccgtaactgtaagacttatattccttaccactgaagttaaccttggatccatgagtcaagtgaccgccagcatccattcccatacctaaaatgacatcacctggcttcaaaagtgcttgataaactgccatgttagcctgtgatccagagtgtggctgcacattagcaaactttgcgttaaacaatttttttgcataatcaatagccagttgctcaacttgatcaatatattgacaaccgccgtaataacgccgaccaggatatccttcagcatacttgttagttaaaacagaaccttgtgcttcacgaactgcatcagaaacaatattttcagaggcaattaattcgatgacgtcttgttggcgctgttcttcatgatgaatggcatcccataatgcgggagatttttctgcatatttcattgataaaaagacttcctttctgatcaacactgatagtttttcttatagttaaagtataccatttagcaatcagatacgcacgattactacgcggaaattcctttttaaaagccgctaaaactgcatgacggccaacagctggatcagtcaattcatattcctgcgtaaagttcaaatagccatcttcagttaaaattagctttttaccatcatttttcacactaattgaacgatccttttttgccgttaataatttaatttctacatatttacttttattactacacatttttttgagcaaagtctctgcctgcttaattggaattaaacgcataatgacttcctttcagaacagtttctaattcatgactaaaactatccttctgtaaattagaggtaatcaaaagaactagtacttgctcatcctttactgcaaaagcgactctcgctgaacccgcttttttcaaatttaggcgaaactcgtaaattgattttccctcaatccgagtcattgcagcgatcttcactttagtcataccagttgccaattccttagtaatcgcttgatcgattaactgcttaattatcttttgctcattcttatgctttttaaaaaaggttttgcatccccgctcataatgaaatttcaatagcatcattttctaaatcaatccatttccataatagcaaaacatagatactcactttttgaaatacttgttattttcatctaaaataaaaccgcttgtagtataatctacaagcggctcaatattatgagacatcatgcttagcttttaccagagctaagcatgttttcgtatacaactaattacttttaaataattaccttataacaacgtccgagttaagcataacactattcagtatagctttaaacgcctttattataggctaatagccacttaattatagtaaactgtaaaaaataaactatttcatttttctatcctaatcaaaatgtaacacactaggatcaaatgatttagtatctctaacgccagtatacaacatcatttgtgcaagctgctcattcattttcttaatcttatcttctgttgctttttgcccatcttttaacaattcagaaagaatccctcgaccaatcagtacagcatctgcgcctaatgccaaagccttgtatgcatcgtagcctgtcatcaatgatccatctacaaaaatggtcattccactgccatttagtgcttgcttgattgctggcaaaacttttagtggtggcacgccaaatggaacgcggccgtggtgatgtgaaacaactattgccttggcaccagcatctctagccttaacggtatcacgcacggatagcacgcccttagccacaaacggcagtttaactgcatgaacatacttttcaagatcgctaaatgaaatcggtcctagtggaataccatcgactacatcatatttaccattatcaccaggcacatgatcaatatccattccaacagctacggcacctaattcttctgcttgttttagttcgcccataattttatcatggtctgcgtaaggcttcacaattctaactgtatcgccgccctctttgacaatttcggcatattcttcgtttgactccataccaatccaatttaaagtattggtattcttagccgcacgtgccttttcttgcattggcttatgtgtcttatctggtaaaaccttgttcaaatgagagactgcagccagagttaaaggtgaggcatattttttaccaaaaatctcagttgttaagtctggctcaactgaatcaagcaaacgcatctccaccaagatattgtctaagtaggcacgattatgtacattagcatcgtcagcacgcccacttgttacaggaatcatacctttaggacccggccatgggctttttactttttcttcttgattctctatcaaagaagcaccagttactgcatcgtttttttcgttcataaaaatacctccctaattattcttttgtctaaaactatagctcacttttgttaaacaggcagctaaatacgcacttactaaaatgacaggagccaattctattggtaataacagaatcaataaaatagctgttaataaaggtttacccaagataactgcaatacttgcactaactgtaatggctacacacataactggcataattggtaaaaattgcgcaatcgctgcgccaactgctacactagcaaaaatcgaagggaaaatttttccaccacgccagcctaaactaaaacctatattagtagacaaggttttgatgactgctataactagcaaaaataatggtgatatttgcaacgcctggtgtacaaatggaacaatttgaaattcaccagaatacaaggcataactagtaattaaggtaagtaatgcaagaactattccccatatagttgctttaataatcggtgaaatagtaatttttttagcaaaataatcactccatttttcgctccataagaaaaacataccgaagctccaacctacaatcaatggaataattacatacatactatagtgccattgccagagaatatggcgatgatgaataccaaataatccttcttcagggaataatttaaagactattgctgcaccaaccacgccgatcataaccataattaagcaaaaaactttttgatgcaattttgatttaaaaaggctactaaattttggcagtttttttagttgttttttcgaaacgatagtatcccaaaaatgattccatttccaatcagaagaataagcaattagtcgtaatctatctcccagccaattaaccatgccacttcctagtacagtagttgaagcctctggtccaatactgccacccgcggctaaagaaataagacctaaggttaaggatttccaccaattgtgataattgatctttccctcctgcttaacactcattaaaacttcttcgatagttaatggatatgatcctaaacgcttaattaatataccaataatgaaaccaaaaggaatacaaataaaaaacggtaaagcctgactaggaacaggtaatttatcaaacaaaacatgccagacaaaattaataataaaactgaaacttgaaagctaagattaacgctctttccccgcgcctcttggctttttcttatcaaaaataaaaacgcaggctctctctgcgttatactttaagtgtcgacctaaaaagtaaaggagatcctgcgcaatgaacagtatagaacaaatcgacacagaaaatgatactaaatccttaatttcttcatttattaatctaattggtctagctaagttaactaaacaagtcaattttaagcgtaaatccaccgtttcattaaccatgattatctcttggctgatgtcagtacattttgctcggctttctttattcagagctaaggatgacaaacgtttttccgttagaactgctcgcaatgtacttaacgatggaagaatcaactggcaaaaactattatgcttgattgcagcccggctcattggctgcttaaaactatttatcgataaaagacgccgacttgcttttatcgttgacgatacgctgatggctcggtctttttctaaaaagaccgaattgctagctaaagtctatgaccatgacaagcatgagtattggaacggatatcgtggtttaactttaggctggagcgatggcaataccttcttgccggttaactttgccttgatgtcaaccaaaaccaagaaaaatatgattggagctgctcccattactgctgatgaacgttcaatttctggtaaaaggagaaatcaagctcagagaaagatgaatgatgtaactgtagagttgattagacaagccttacgattaggagtagaagctaaatacgtcttattcgattcttggttttcttctccaagaatgttttggattttaaagaagatcggtttagatggacttggcatgatcaagaagagttcaaagatttattacatttatcgccatcgccgctatagcgttaaagacttgtatgatcgtttggctgcttcaaacatccgtaaaaagaaacattatctttattcaagcatagttgaggctcaatatcatggacatagctttttattaaagctcgtctttgtctccaaccgtggaaacaagaacaagtatttggttttagctactactcagacaaagcttagccctgaagaaatcatccaactttatggtcgtagatggcaaattgaaacatattttaagacgtctaagcaatatcttgctttagataaatctcaagttcaaagctatgatggccaatgtggctatatcgcagttacagcaataacttatgatctattgacctggcaggaaagacaaaatacagatgataagacaatcggagatttattctatctaatgaacgaatccttacctgatattagattcgtagatgcattggtctacttaatttcagaattaaaagagcttaaacagaatagttttgaaaagatagatgaagtaatcaatgactttattaaccaactgccacgattcatacaaattgcactgaaacagatcatataaaaactaattacgtctaagaaagctcaatagtgacaggacttgagcttgattttggtgctttcaattttcagataataaaattaattaagtttaaatatgtagcacagcatattccaataagagactgtaaaatagtttgtgtaaggatgaatgattccttaaatttatttctttaaacattagaaaaaggagttcctttctcgtatgattggtttgaacaaaaaaaacacatacagaaagaagaactccttcatgaatgattttaccaaagattttgctcaagctctattcaatccagacaaaataaatgatttattgcgcaaagaactacaacaggctgttaataacttgctagaagctgaattgactgcctttctgggctatgatccctatgccagaaatggctggaatactggcaactctagaaatggtgcttatttccgcaaagttgatacgcaatttggcccaattgaagtgcaagtgcctcgggatcgcaacggtcaatttcatcagcacacgctgcctgactacaagcagcactcggatatcttggaaagcatgattatcaagctttactccaagggcgtgaccaccagggaaatagccgatctaattgaaaagatgtatggcagccattacagtccagctcaggtatcaaatatttccaagcagatgattccaaaggttgaggcttaccacaaacgcaagctaagcgacaagtttttctgcgtctatttggatgcgacataccttcctttgcgccgagaaacgtttgagcgtgaagcagtctatattgccattggcattaaacctaatggacataaggaagtcattgactactgcattgctcctagtgagaacattgaagtctggacagagatgcttcaaaacatgaagtccagaggcttgaagcaagttgaactctttctttctgatggtgttgttggcatgaaaacagccttggccaggacttatcctaaagctcattttcaacgctgtttggttcatgtcatgcgcaatatctgcgctaaagtacgcgtcgacgatcgtgaaaagatcatgaacgaattcaaacaggtgcatcaacagacaaacaaagaagaagccacagctgtcctgcatgacttctataccaaatggggcaaggtttacagccatgttatcagaagcttgaaagacatagaaccagatctgctggtcttttataactatcccaagcagatcagagcttcaatttattcgactaacatgattgaatcatttaacaatgtgatcaagcgcaaagctaagcctaaggcagagtttccaactgaacagtcgcttgatgcttttattggtattcaggcaatgagctacaatgaccgttatttcaatcgaattcataaaggctttggtcaggttcaggacaccttagaatcctactttgattaaataaataattaaaaaatcaatttacgagaaagaactatttacacaaaagatttgacagtttctccaataataaaactccaaatggtagcataataaaatatattaagttccttcattaggattttttccttctctaattctcaagaattgaaatttctttttaaaaattataaacttttatactcgtaaagcaaaaatatagttaaaatactggtataatatcgtttcagaataattaatgtagaggtgagatttctgatcatgaaaagtgcaaattacactagaaaacatcacatgtatttaatgaatcacaaaaatggtgacgttatcgaagtaagaatggacaagaaaaataagacattcaagaaaatacgactttatcgtcaagatggtttgggcaactactatctagatccacatgcggagtttaaggatcagaaaagtccagcaaccaaagagaatatcgtagaagccggaaaaaaggtcagcgatcatatctctagtgctgagaactggcaccataaagttagacctattttcaacgctgaacacaaaatcgtcgatttcgaaccacgattgcatttggaacaccatactaagattcaaaatgctaaaagatatttgcgtcacttggaaagacgacacgcagacttcattttccgtaaaaatagcaaaacgcctttgttaatcccatggaattacatcaaggatatgatctatgaagatcgcaataaagaaatggttctagcccataaggtgcacaagttaagaaaatagtctaaataaagtgtctgggaaaaactcagaaattaagaaatcctaataaatcttggtatcaataaaccttgatttattaggatttttttgagtgaaagtctaaaattaattaaaaataaactttttcccagacactttgttagagtaaaaatttagtattttacgcgttcaccttttttaacaatggtcaacatactacagaaagagttcaaccatgtcggtttacgagagtagctttttgatgcttttgttggctttgctgacttacatcgaccaccacaaaaaataatattaagctttcttaattctaaacaataagatttctacccaagataattgtaaattataactatacgcgtggtgctagttaaatctttctagacaataagccaaattataagctaaaattgcaatttccaaccggctttgaaagcctatcagactacgtgctcgattgttctcggcattgtaataggtcagaagcgaaaagtcgctttcaattgttctgcgaatagccatcaattgatgatcattgtgctttttagctcctgtcatatttttacgatatggtgtccaaagttcataacccatttgttttagctgttgatgcagttctttgcctaaatagccttcgtcgccaagaagatagtaattagatggatgggcattttccagcagttcaactgtctccctggcatcatgaactgatgcttttgttacgacataatcaagaatggaaccgtcatcgctaacaatggcatgaactttgaaaccatagaagtaaattttcttggtggccttataaccaatgttggcataaccgcgaaaaattttagcacgatagttgcgaattggttggcaaacaggtaccggaaagctgtcaatgatcaagaaatgtccattcaggtcaacctttttattcatttcttgccgtatctgataaatcaattgcaatagctgacgtgaacgccgattaaaacgtgagtgtgataaacaattgaaacattcacagaatcttctttgtgattcaattcctgtcttagcttgccagataagtaaagccaaaatcagactgtccgtagttttaatttgatcaatatttcgccgatgagtaaactcagccggtgcatacaaacgataccagtgccgacaaattatcactaaatctttaaaactaacttgtaaatggtggctaaaacgcttaagcttaaggcagttcaatcagatcagactcttttctattattactatttacaagtcgagtctaacaagattggacttttttattaactaaaacgatttaactagcaccatgcgtatattgaatatatttcaatggatcaagatcgtttctttctccagtcttaattatacttaaaatgatagcgacagattgggctcctttaaaactttgagagaaaatccaattgtttcggcccatcacaagttctttaattgatcgttctgccatattattggtcaaaacaagatcgccatttcgcagaacatttctaaatttatcttcgtgacttaagaagtagctgaatgctttacctaatttggagttacgtaggacatttctttgctttttatgacaccaattaatgaacttctcgattaaaggtttaagttgcttctttcggttctcatatctttcttcacttgtgagttctgcccattggctgtctaagtgaaagatttgattaatgtaggcaagtgccttttgagaaattgaagtgtcatcatattcttgcggttgagcttcataaaacttccttctagcgtgagcccagcaaccaactaaagttacatctttcagttggaaatagccaccatactgatcacagtgaacgaagccatcgaaatcttgcaaaaagttaacagcttcaatccctttacgactaccatgatgataagtagtaatcttcttatctgagtatcgaccagacaggaaagtccaataataggtcttagctgtctctgattctaatacttgatacggagtttcatcagcgtgaatgaccttctcttcaagtagttcttgatgtaataggtcataaatcttacccaagtagtagtcacaaaccttaatatgccagttggtcatagtctgtctactaattggaagacctaatctctttaattcactttcttgacgataagccggaagctttagcttgaatttgtcatgaatcgtatgagcgatcagtgaagctgaaccaagtgcactatctaatggtgttttgggcattggtgctttaataatcttatcgctatagttatgatcactacagtagttgcagcggtaagcatgttgataatgatccagtctttctaaaactgcaggtttgaagattacttctttctttaccgaactcccaatatcatgcatttcatgatgacagtcaggacagtttttatcttctaaaacatgatcaacacgtttacctgggagattatcaataatctcttgtttggtttcgttgtgtttcttacgatgatagctcttaacctctgttacgggaatagggagagtctccatcatcatcttgacctaggtcttcatcatcaaaaagattagtttgaccaggttgaaagttagtcttttctgaggagcgagcataaatcttattagtcaagtattgaacttgctcagttaaaagtgcaacttgtttagtaagttcacgattagtttcagttaattgggcaactaattctggataattaatttctgccatttcagtactcctcctcattcgctttttaaaaggataccgaaaaagccacatgaaatcaatagaattcacgcggctttgcatcttttatttttggggcaatcgaaaatcccttcatgagccaatcaacttgttcagctgatagcttttgaacttcatcttcattatcaggccatgaaagttttccactctcaaagcgtttataaagcagccagaaaccttgaccgtcccaatataaggctttaaatctgtcttttttacctccacaaaagaggaatacttcaccagaaaatgggtcaagttcaaaccggcttttaataatgtagcctaaggaagcaattcctttcctcatatcagtctttccacaaacgatataaacttgcccaagatcactcagatttatcatctttgaccaccttgtctaaaatcttcatgataagatcttgattcatatctttatagaagtgaagttcaatatccggcgttgaatacttgaacagtagattattttcttctttagcttttttaatttgattaggagctaaaggaataatgggttgatcttccattaaaaagtcctcctcaattaacttgatgagccaagtataaatgaggaggagcacaaattatagacgtcttagattttgacgcttactctaaaactaatctagatactcggttattttacgcttacgtagaatcttgttttcatttcacacaaaaaggcgatcaaaaacaatttttcaaaagttttcgatcgtctttttaaatctgagaattaactttctctagatacttttaccaatagaatttataaaaaactattataaattattctttatcgcgcttcttcttaaatccgaatagaccaagtgaagctaaaagcataccaagcacacccaaaattgaagtatctttagtgcctgtttgtggtaatgtctttaagctagtagccttgttattaccaatagcattatcactttcacccttaacacctaggttgttaccagcgtttgcgatgctaccattagcagtagaagctcccttaactccatcaacttgactagagtttgaaccattcttgtgtgaatgatgcttgcttccaggaacatcttcgcttttagcagcgatgactaaatcagtaccagcaatgacatcctttgaaccatctgggtaggttactgtagtagtaccatcatcacctactgtaataactgtgcctgctgggaagctacccttattagcattatcgacgttgttcttaacttgattcttttcatcatcagttatcagttaagtgatttggatctttaacagtaaccttgccacctggaatagttggcgtaatgttaccagcatcagttgtgtcgcccttttggccttgaactaattggtcacctggtatggtgtcctttgaaccatctgggtatttaatcgttgctgtaccatcatcgcctactgtaacttcagtgcctgctgggaacttatccttgttggcattatcaacgttgttcttaacttgattcttttcatcatcagttaagtgacttggatccttaacagttaccttgtcgcctggaatagttggcgtaatgttaccagcatcagttgtgtcgcccttttggccttgaactaattggtcacctggaatggtgtcctttgaaccatctgggtaagttactgtagctgttccgtcagcacctactgtaacaactgtgccatctgggaagttacccttattagcttcttccacattcttcttaactttatctttttcagtttcagttaagctgctggtatttgctactggttccttggttgctggaacagttggtgtcttcttctcagcttcggtttctggacgtaccaaatcgctaccttggattgtatcagttgacttatctgggtaagttactgtagctgttccgtcagcacctactgtaacaactgtgccatctgggaagttacccttattagcttcttccacattcttcttaactttatctttttcagtttcagttaagctgctggtatttgctactggttccttggttgctggaacagttggtgtgatcttatttgctaggacaacattaagttcgttccaagccttattttcagcttcagtaagcttttctaccgtcgcttgatttgcataggtacctgtatctttgttaatcaaagctttagttacttcagttgcattgtcataagctgcctttttatctggatttgcgtatttatagcgatcagatgcctttgttgtatcttccttgtgatcagcaaaactgccatcagaatcatactgtccgatactattaccaagctttttcatagcatcgtttaaggaatttccttccttaataatgttgcttacagcatcatggtctgtaatgttatttagaattttattccgcaaaacattaatttgagcattatttaaatagtctttcttaatctgacccatagctctagtggcatcaccccaaccagaaacaacttcattagcttgttttactacaccagctggactcagtgctctctgctcaccatataagcgagaaaacatgttccagtggccattctgataagaataaatattagctgagattcctgagaattgttgatttttcggacctttatctaaatttacttcataagagtctgtgtgttgcgtagtaaaggaaattttataagaagaaaattgtgcttgactagtgacaccttgtgacttaaattccattgcttggttaaagttataactgctaaatacgccatcagaattaagtttaccgttgaacttatcatatcccagtttgtcataaatgactaggtccccttcttttgcaccgtcaactccagttttatttgtaattttaaaatcactaaaatgaagttcatgatcgttacctagataaggggacccatcatatgcattattagatcctttactaaatagaccccattttttaaagtaagtctgccataagttctttttaccagtatcagtagcagtagtgagaaactgtcaaatcttttgtgtaaatagttctttctcgtaaattgattttttaatcatttatttaatcaaaataggattctaaggtatcctgaacctgaccaaagcctttatgaattcggtcgaaatagcggtcattgtagctcattgcctggatgccaataaatacatcaagcgactgttcagttggaaattctgccttaggcttagctttacgcttgatgacgttgttaaaggattcaatcatgttggttgaataaattgaagctctgatctgcttgggatagttataaaagaccagcagatctggttctatgtctttcaagcttctgataacatggctgtaaaccttgccccatttggtatagaagtcatgcaggacagctgtggcttcttctttgtttgtctgttgatgcacctgtttgaattcgttcatgatcttttcacgatcgtcgacgcgtactttagcgcagatattgcgcatgacatgaaccaaacagcgttgaaaatgagctttaggataagtcctggccaaggctgttttcatgccaacaacaccatcagaaagaaagagctcaacttgcttcaagcctctggacttcatgttttgaagcatctctgtccagacttcaatgttctcactaggagcaatgcagtagtcaatgacttccttatgtccattaggtttaatgccaatggcaatatagactgcttcacgctcaaacgtttctcggcgcaaaggaaggtatgtcgcatccaaatagacgcagaaaaacttgtcgcttagcttgcgtttgtggtaagcctcaacctttggaatcatctgcttggaaatatttgatacctgagctggactgtaatggctgccatacatcttttcaattagatcggctatttccctggtggtcacgcccttggagtaaagcttgataatcatgctttccaagatatccgagtgctgcttgtagtcaggcagcgtgtgctgatgaaattgaccgttgcgatcccgaggcacttgcacttcaattgggccaaattgcgtatcaactttgcggaaataagcaccatttctagagttgccagtattccagccatttctggcatagggatcatagcccagaaaggcagtcaattcagcttctagcaagttattaacagcctgttgtagttctttgcgcaataaatcatttattttgtctggattgaatagagcttgagcaaaatctttggtaaaatcattcatgaaggagttcttctttctgtatgtgttttttttgttcaaaccaatcatacgagaaaggaactcctttttctaatgtttaaagaaataaatttaaggaatcattcatccttacacaaactattttacagtctcagtagtgaaatagtatgggccttgcaaatatttattgttataagctggcatagttttactattaattaaaccagtattttgatcaacatccgtgttaggattaaacgaaaacttcacttcagctggtggattttgtactgtagtttcagtagcgctattactaccgggcttatatatataagttgaaaatgtttgattatgatcactaattacgtccatgtcaacattaccaacgatttggtagtcattagtgagagcaataccaaattttgcagaacttaacccacttaatttactgccaacattttgtaatcccttattagggaagaaaacaacagtccaacgggtcttaccatttcctaaatcttctttagaaatattgatattatttttagtatcttcagctgtcgcatcatcaccattagcttgaatatcagcagtatggtaaacgtagtcattaccataaatagttacaatcttgtaatactttccatctgtaccttgatagatattagaactgtagttatctgaagaagttagattatgcttattggccaattcttgattttctttatctggctgagtattaatgttatctggatttactgtaactgctgcacttctgtcactaccagtattagtaccagaagctttcattaaattcattgccaataaattcatagttgctaatttcgctgctgatatagctgttaatgatctaatatctaatgatttaatatcagtgtcagcgctaccttgcgtctttggtgcagattgtgaggttgtcgcagcttctgtagaattattagctgttgtattgttacttgcactaccttgtcgaactttttctgttgcactagttgctttctgagtattagtgttattttgatctactgtagctgctgatgatttaatatcagtgtcagcgctaccttgcgtctttggtgcagattgtaaggttgtcgcagcttctgtagaattattagctgttgcattgttacttgcactagtttgttgaccttcttcttttgcactagttgcttgctgaccattagtttgctcagtagttggcaatacagctgctaaagtttgttgcgaattactgtttgctggactattggatttttcaacgctttctgtggttgctgcctttacagaatgatttgtaaagttaattccaaaaatggttactcctaataataccgaagccataccaacgttaagcttacgcagactataacgtggtgtccgcttagtttctaaaaatttaagtcgcttcatcgttattcttgcctcccaaatttaataactagtggtatttttaaatccgataacattacagcacggtttagcgactttgacgaccgcttgtctctcttttctgtttgcagtcaacttaccagatagtaaaagagactaaccgccaaggctaatctcttttcaaacggcagattgcaagaaataacttgaacaaagttagtgacgcagattacgcaaaaagatctcaattagtgtgcgccagtttaaacatttgagtggcctggagttcaaataccagttaatttgaattaactcatcatcagtgattttctcaatcggttgacctttgggataaagcgtcgtagtactcggttgcgattctcattactgccccattcatgtggagaataagcatgcgcaaagtataggggaatcctggcctgcttttcaattagcttgtagttagcgaattctttcccatggtcaacagtaaggggcttgagattatcttctaactggttagctaattctaaaatggccttggttattgaggtactatctcgtccctgaagccgtttaacgatgataagacgactcttacgctcgacaaacgtagctattgcgtgacctttacgctttccagataaaactgtatctgcttcaaagtgacctgaggtatgacggtcaataacttcagcgggacgatcttcaatggaacgtccatggctaaaagtcccacgggtttctttggctcgtcggcggcgaattccatggtcaggtaaatcagccacgccaatatccaatactccttgctcaatccagttgtagatggtcttgtaggcgattctaactacatgagccacttgttcaatcgaccatttttgtcactgaatacataatactttctaactgtgattgaatatcggcgaactgattttgtaagatactcaattgtgatgatgttttagtacctgtaatacccatcaacgcctctgacaatggtaggcgaccttcatcagacagcttggttaataacgctgatacaacgtcagtattaccttgcttccattcatttctggctttctcatttcatctttaatcatctgccgaattgcaacagaattactcttcacatcgagcagtttcttcactttatcaaaatctgctaattcatcttcatcaagtcgactttgaattagctcatcctttaacggcttcatcgtgcaatgaccccctcatgtttgccgtcccggcaaaataaattttcagccttcggttgcgaccgatcagatattgcattcgagaatgagtaccttgagatttcattcaaggtcatttcgagatttcatatctgatttacttatgttttcgtcataagtaacaacaacgatcaaacagactgctccgtttggatttcagcatttcttttgtggcaacaaagagctggcaaagaagcgaacagtcaacggtagaattaaaggtgcgcaaagcaagaaatacttgaagacgagaatcaagcttcaggcatcctatcagcgtgcccaaaacattcaaacggatttaatacataaatttactactgaactggtaaacaattacgatcaaatagcgattgaagatctgggagtcaaaggcatgcttatgagccatgtggcttcaaaaggcatgcatcgaagcatgtttggcttgtttagaaagcttttaacatataaatgcgaatggtatggtaaagaactgattattgccaacaagctatatccatcaacgcaaagatgcgcagcatgcggcttggtcaaaaaaggcgatgaaaagatcacgctgcagggcaataaaaagcatggcaccaagcataacgagtttgtctgttataatcctagctgtcctaattacaataaaaaggttgatcgcgacgaaaatgccatggccaacctaacgctgctagtaaagcatccagagttaaatcgagccttataagataattgcgggcgaggctacgtccgaaaagatgccaaaagagctagtcaatgcgattacttctaaattgaaatatcggaatactagcgtagacgttggtaagagaaatggaaggtacaaatagtccaaaatgtatgaaaatagaacatagtcatacatttgcttacatttttcatagcagaaacaaaaatgccccacttatcaaatgacaataagtaggacaacagtcacttacttttcaacaaaagtaagcaaaatattcaattttcggtagacaaccccaaaataacgaacaggtaatagtagcgtttaatgcactattcatgctgattaaaatcaacttctaccggtagaaaaacggtagacaacttgctttcaaccggtactttccactaatattaaccctattcaaatgccgtcatattgggattccctcttcttattaaggtacgaaattattcccactcaatagttgaaggtggcttactcgtcacatcgtaaactacgcggttaacgttatctacttcattgacgattctatctgaaatgtgaccaagtacatcccatggaatttgggcaaaatctgcagtcatcccatcaattgaggttacggcacgaataccaatggtgtagtcataagtacgtccatcgcccattactccaacggagcgaatacctggaagaacagtgaagtattgccagatcttttcttgtaaacctgccttcttgatttcttctcgtaaaatcgcatcagaatcacgcacaatcttaagcttgtcttcagtcacttcaccaagaacacggataccaagaccagggcctgggaatggctgacgccatactaagtcatgtggaatgcccagcttttcaccaagttcacgtacttcgtccttgaacaacttacgcagtggttcaatcagcttgaaatgcatgtccttaggaagaccaccaacgttgtgatgggacttaatcgtttgggcagtgttggtacctgactcgataacatcagtataaagcgtaccttgagctaagaaatctacatcctttaacttcttagcttcttcgttaaagacctcgatgaattccttaccgataatcttacgcttcttttcaggatcagttacacctttcaacttgtctaagaatctcttttgggcattaacccgaatgatgttaacaccaagatccttgttcaaggcttgcattacttgattgccttcgtctttacgcagcattccgtgatcaacaaaaattgcagttaattgatcgccgattgctttgtgtaaaagagtagcagtaacgctagaatctacaccacccgaaagacctaagatgactttcttgtcgccaacttccttacgaatatcatcaaccttcatgtcgatgaagtcgttcatggtccagttagcctcagcaccacaaacctcaaaagcaaagtgcttcaagatgtctaaaccgtattctgaattgcgcacttctgcgtggaattgaatgccataaaactttttatctggattagcaattgcagcaattggacagtttttgcttgaggcagttacttcgaagccctttggagcttgagttaccaaatcaccgtgactcatccaaacgtattgctttgaaggcaagcccttgaacaaaatactgtctggatcttcaaccgtaatgttggcgcggccatattccttgttttcagcttgttcaactttaccgcctaagtcatgagacattaattgcatcccgtaacaaatacccaaaattggaatatccaacttaaagattgcaggatcaacctttaatgcaccattatcgtaaacactgttaggaccacctgagaaaatgattcccttaggattgatctgtttaatcttctccatggaaagatcgtgtggtaaaagttcagaatagatgccgaagtcacgaatacggcgggtaattaattggttatattgactaccgaagtcaagcacaataattttatcaaaatcgtctagattcttagccactatttactccctcttttcaattacgcatttttaactaactctactaggaaaaattaaaaaggtcaatcaaaaagttaaaaatagccattcattgttcggcttttatcttgagcaaccagtagttgcaactactagttgcgctaaatgcaattaaacagtggttgtctgcaaccgcaaattttcgttaaatgaaattattccaaaacgaaaggacgatcaatcatgagattaggtcaaaaaattgcggcattacacaagaaaaatcatctttttcaagagacactagctgaaaagatgaatgtcagtcggcaagctgtatccaaatgggaaagtgaacaatccattcccgatattgaaaaaattgtagctttatcagaattatttggagtgaccaccgattatttaatcaaaagcggctcaccttcttttgaattaaaccacaaagataataacttaactgaagaattgccaattttatctgatcaacaagagcaaggcacttaacagctgctcaaaaaagtgccagccttcgcgctttagccattagtttaattattcgcagtccagccatcctttgcttttctactgccctagctattatgcttgacctcggcaatttaacaatccaattaaccggctgtcgcaagattatgaacaaatacgccacactctattggttaatagcagtcttactttatctaggatatagcttcattaccaatgattgggaacgcagctggatcatctggccaatcgcggggatcttatatggcattatcgaaaagatcatcagtctgtgccataacgatatcgcagctgaataatttttactataatcgaacattaatccttaattctccacttgtgttcggcaatatattctgttaagattaagccaacacaaatatctatatatcgtcgaaataaggtcgacagtctctacccggtaccgtaaataccggactataggtgaatgaaagttaagaataatcttaaggacttcttttacctgctctaggtagaggaagtccttatttctttcttgaggaggataatgttgaaggaattagtagatcgaattaaacaagatggtgaagttttacccggaaatgtgcttaaaattaattcatttttgaatcaccaagttgatccgcaactaatgatgcatgttggtgaagaatttgcccgcctttttaaagatgaaaaagtcgataaggtcttaacttgtgaagcatctggaattgcccctggcgtaatggcagcctatcaactgcacgtgccaatgatctttgcccgaaagaaaaagccatctactttgaatgatgcagtttattgggctgacgtcttttcttacaccaagaaggtcaacaataagatctgcgttgaagaaaaatttttgcacccaggcgaacatatcttaatcatcgatgacttcgttgcccacggtgaagcagtcaaaggcatggttaacatcgccaagcaagccggctgtaacattgttggcgttggcgctgttgttgcaaaaaccttccaaggcggaagcgaatgggtagaaaaagaaggtctacgttttgaagccctagcaaaaatcgatagctttgaaaatgatcaagtacacttcgagggagaagaataattaaaaatggcacaaaaagaagttagtcacaaaaaagctgctgtcctaggtttgcagcatttgctggcaatgtactccggtgcagttgctgttccccttttaattggtacggcactacacttcaatagcacacagatgacttacctagtttcgattgatatcttcatgtgtggtttagccactttaattcaactattccgtaataaatatttcggcattggcttgccagtcgttttgggctgtgcaattcaagcggtagctcccttagaaatgatcgggcaaaaattttcaattaacaccatgtatggtgccattatcgttgctggaatctttgttttcttaattgccggatggttttcaaaaatcaaaaaactcttcccgccagtagttactgggaccttaattacagtaattggactaactttgattcccgtggcctttcaaaacatgggtggcggaaatgcccaagccaaggactttggtgatgcaaaaaatcttattgctgcctttatcaccatcctcatcatcgttgtcattgaagtctgggctaagggatttctccgctccatctctgttttaattggattaattgctgggactatcattgctggttgcatgggattagtttcacttacacccgtaacacaagcctcttggttccacttacctcaatttttctacttcggcgttcctgaattcgaatggtcatcttgtttgaccatgatcatcattgccttagtttccttggtcgaatccactggcgtcttctttgccattggcgacctacttcatcaagatatcaccgaagaagacctcaaaaaaggttatcgtgcagaaggattagcacaaatcttcggtgggcttttcaacaccttcccttacactactttttctcaaaatgtcggcttacttcaattatccggtattaaaaccaagcgccctatctattgggctgctggcttattaatggccatgggcttacttcctaaaatcggtgctctagttactatcatccctgattcagtcttaggcggcgctatgttagtcatgtttaccatgattgccgttcaaggaatcaaaatgttaactaaagttgattttgaaaataatcgcaacattttaattgtcgccatttcaatcgggatgggattgggcgttactgtctatcctcaaatcttccaaactctcccccaaaccattcaattgttcttaggcaacggtatcgtcgtagccagcatctgtgcaactctgctcaatcttttattcaatggaagaagtggtgccaataagtaaaataccttttcattttataattccacatatcataattttctataaatattcacgaacgaccgcttaatgtggtcgtttttcattcttcaccttttaagcaaaatctcttctataatagaagtaacataatttttcaacagtgaggaagtctatgcctaacttaaataaccaaaatcttgatagctacatcatgttttatggtcgacaaaaatgtcagcccgatgaattctttcaaggtgacaatcttcgtaaaaacgatattttttattacattattagcggaactggtacctttacttctagtagacaccacgcagttaaattaaaagctggcgatcttttttacgttccacgcagtcaaacttgttcctttcaagctgaccacaatgaaccctgggaatacttctggattggcctagctggcaacggcgttaatgaaagcatcaaggcatcaaatttacctaataaaaatttcttgcgtcaaattcaaaaaactgccttttatcaaaccctagatgacctttatcaatgtttggcgaagaaaaagaccttattaaacaatttaaaaatttcagctttaacttatcaacttttttatcatctagtaaaagactttcctaaccatccaccagtccgcaaaacatcgaaaaatgatcagtatcaaattgccattaactatctcaagcaaaattataccgatcctacctgcaatattgtcgaactctgtcataggctaggagtatcacgcagctttttatatgctttgttcagaaaaaacactaaattatcgccgcaaaagtacctcatgcaattgcgcatggaagccgctaagaaagaattaactaataccacacacaatctaaagcaaattgccaaaaaagtcggctacggcgatgaatttaccttctccaaggcatttaaacgctatagcggtgttagtccaaatgcctttcggggaaattaattatattctttggcttatcggattatttttgcatacaatattattaggaaataatttaaacataaatataaagtaaaggactgatccaatgaaacaaacagaatgtactactattttagttggtaaaaaagcaactattgatggctctacgatgatcgctcgtagtgaagacggtggccgcgtcatcatccctgaaggctttaaagctgttaacccagctgaccaacctaagcactatactagtgtaatttctaaacaaaagattgacgacgctgatttagcagaaacaccattacgctatacttcagcacctgatgtttcaggcaaaaatggtatttggggcgcagctggaattaacgctgaaaatgtagccatgaccgctactgaaaccatcactactaattcacgcatccaaggtgttgacccattacttgatccaagtgaaggtggtcttggtgaagaagatttcgtcactttgactttaccatacttgcactcagcttttgacggtgttaaacgtgtcggctatttagttgaaaaatacggtacttatgaaatgaacggtatggccttttctgataaggataacatttggtaccttgaaactatcggtggtcatcattggattgcacgccgtatcccagatgatgcatatgttattgcaccaaaccgtttgaatattgatactttcgacttcaacgattctgataattttgcttgttcagcagacctaaaggatttaatcgaagaatatcacttgaatccagaccgtgaaggctacaacatgcgccacatctttggttcttcaactattaaggatgctcactacaataatcctcgtgcttggtatattcacaactatttcgatccagactttggtggcactccagcagatcaagatcaaccttttatctgccatgctaatcgtttaatctcaattgaagatattaaatgggccgaaagctcacactaccaagacactccttacgatgcttatggcgatcaaggtactcctgaacaaaagaagaccttccgtcctatcggtattaacagaaactttgaaacccatattttgcaaattcgtaatgatgttcctgcagaaattgcaggtgtacaatggttagcctttggtcctaacacctttaactcaatggtgccattctatactaatgtcactactacccctgaagcttggcaaaccactcctaaatttaacttgagcaagattttttggcttaacaagttaactgctcaattaggcgataccaactaccgtgtttacggtgaacttgaagacgcctttgaacaaaagagtttagcacaatgtcacaagatccaacatgatactgacaaagaagcaaagaacctttcaggtaaggaattacaagacaagttaattgctgctaatcaaaagatgtctgatacagtttataacaacactgttgaactgcttggtcaaatggttgacgaaggtcatggtttaatgactttgaaatacgacttgcttgattaaaaaattaatcgcatacaaaaaccacacggaattttcaaccatgtggtttttcgtttaccttattttgtgcaagaacagatttgcttcttggcgagaatgaaatacaatgatctgcttatttggatatttttgcaattctttgactaaaatcggtctttgaactgtccgaaacttggcaatataactcataaattccggatcttcatcttcttcaatccatggcaaatcaggacgtggttttccttttctagcttttacgccagctagacaaacttcagttggataatctaaccaaaaaatcgtatcacatttgggtaaacgatatttcaaggtacgttgatagtttccatccataatccatgctggtttagctactatgcgctttactttttcatctaattcatgcttggagaccgtagttttatttgcatgccaaaaaagttgatccatatacaccaatggcaatttcgtttttgattgcaatttccgtgcaaatgtacttttgcccgctcctggtgaacctaaaattaatacgcgtttcatcataaattcaactcatatgctaaacgatcaggattaatcggatcatctacttgaattatccctcgttgaacaaaaccgtgactcaatgcaatatgctggacgatcttattttttgcgccagtatcaattctaaagttgtgaatcccctgtgcataagtcagcgaaataatattacttaagaacaattgagtcaaatgcatccctctaaattggctagcaaccgcaattctatggatcgtcgcataggtatccacattatttttccactcaccatcaattttggcataatttggatcttttccaatcaccactgccgcatagccagccacttcattatccacagttaatacccaagcaacttgcttttcgatgtcttcctccaccgtttctcggttaggatagccactttgccactgcgttgagccatttttcttcaaaaaagtaatagcatcctgcaaaatctgcacaattttatccacatctgaattttgcgcacgtctcgtaaaaatcaaactcattcttttcacctacaaattgacatattcaaaaaccacacggagtcttccatgtggtttttatttaccaaatattatctaaaatacccggtacagcaggatcatccttgatagttacatcagctccaagttgacgcagcttttcttggacccgatcataaccacgcaagatattaccagccttgtcgatcgttgttgtaccatcagccatcaggcctgcaatcatcagacaggcacctgcccgaatctcacctgcagttacttccgcaccatgaaactgcttagttggatgggccaaaataatattatcttcaactttaatattggctcccatcttttgcaactgagcaatatgaccaatccgtttaggataaatattatcgattactacaccttcaccgcttttagcagttaataaaagtggtgtaattggttgctgtaaatctgtcgcaaaaccaggataaacatctgtcttcacctggaccatttttaggtcgcccgctgggtaaacatacaaagaatcttcatctgaatcgattactacacccatttcttcaactttagccaggtatgaatcaaggtgttcttcgataatattatgaatgcgaatgccattaccaatacaggcagctaaagcaacataagtccctgcttcaattctgtctggaataatcgtatgaggaatctgtgctttaagctgctccaccccttcaattcgaatagagtcagtaccagcactacgaataactgcccccatattgttcaagaaggtagctaaatcaataatttccggttcctttgcggcatttttgattatagtctggccctgtgctgtcacactagccataataatattcatcgttgccccaactgatggcatctttaaatgaatttttgctccatgcaaaccatcttctggtgcagtaattataatttgatcattttcattttttacgctagcgcctaaggcttcaaagcccttaatatgttggtcaatcggacgtggcccaatatcgtcaccaccagggaagcccactactgccttgccaaagcgaccaagtagcgcacccataaagtaatatgaagcgcgcaaactcttaatcttaccagctggcaacggactcattttgatatcagttggatctattcttaaagtggtttcaccgaaatcacaatgtacatccatctcacttaacaagtccatcaagttaaccacatcagctattcttgggacgccttccaaggtcactggtgttcttgataaaattgatgccggaataagagcaactgttgagttcttagctccaccgatccaaacatcaccctgcaggggctttccaccatgaattatcatctgcttcattggcgaaaacaaatccttttctactttcaattaatcataataatgttaaaggatatttacaaaaaaaacaagagctgaggtctctcagttcttgttttcttaagattttgtataatcaaactttaatcactttaaaattcttgtgctggaagaccactagctgcaccaataaatgacttaaataagccttctggacgttgtggccgactcaaaaattctgggtgatattgtgctgcaataaagaattttttctttggtaattcgataatttcaactaagcggttatctggtgaaacgcctgagaagaccataccagccttttcaaaggcttcacggtattcattattgaattcaaaacggtgacggtgacgttcttgaataacatcttgatcatcgtaagccgcacgagtcttagttcccttcttaagagtagctgggtaaatacctaaccgcaaagtaccaccaatattttcttcatcacgcttatcagccataatgtcgataatattattcttgcagtttggctctgcttctgcagaattagcatcctcaaggtttaatacatcgcgtgcaaattcaacactagccatttgcatccccaaacaaatacctaagaatgggatgtcatgttcacgagcatacttaattgcagtaatcattccttcaagaccacgagtaccaaaaccaccagggacaatcaaaccatctgaatccttcatgatttctgcaatattatcttcagttacgtcttcagcttgtaccttatcaacatcaatcttagtgttgtaaagataacccgcatgttgcaaagcatcagtaactgaaatataagcgtcttcaagctctacatacttaccaaccaaggtaatcttagtgtgatgcttcaaggtcttagcacgttcatcaagcttcttccaagcttccatgtcagcttctggctttggactctctaagtgtaagaaatcacagactttttgatccatgccttgcttttggaagttcaaaggcacatcgaataatgaaggagcatcaattgattcaataattcgatcaacaggcacgtctgtaaaagtagaaatcttgtctttgtgttcttggtcaattggttgttcagcacgaagcactaacatatttggttgaataccaatactacgaagctcagcaactgagtgttgtgttggcttagtcttcatttcatgagcagcgtgaagaagtggtactaaagtacagtgaatgtacattacattttctgggccaacttcacggcgcatttgacgaatagcttccatgaatggagttgattcgatatccccaacagtaccaccaatttcagaaataattacatctgaatcagtagtcaaagctgcacgcatgatcttctttttgatcatgttagtaatatgaggaattacttgtacagtagcaccatggtagtcaccacgacgttctttttccaaaacttcttggtaaatcttaccagtagttacgttagaatacttgctagttctaacatctacgattctttcatagtgacctaagtcaaggtcagcttctgtaccatcgtcggtaacataaacttcaccgtgttggtatggattcattgtacctgggtcaatattaatatatgggtcaaacttttgcatagtgaccttcaagccacgattcttaagaagtcgacctaaacttgatgcagtaatccctttaccaagtgaagatacgacaccgccagttacgaagatgtattttgtcatgttctgctccttttaacttatcctttaaacaaaaaagctcccactaacggggagctaaacgcacatagggtgcccaacaaaaatattatctgctttttcttcttaagtcaagcaaattaattatcttcgtcgtcatcatttaattgtgacaattgaccttcaatgccatctggcaatacatcatcagtatcgtcgttgtcttcatcataatcagtatcatcgtctgtggcgtctaagtcgtcatcttctggatcatcgttatcgtagtcgataatgtcatcatcaccagtagcgctagctaagaaggcattaaccttcttgtggtgcttacgtgaatcgtcttcttcatcctcagggtggttaacttcttcatcaactgattcatatgggaaccatgaacgaagtgcccaaacattttcacccattgagataaattcaccatcagtgttcatatcagtataaaattgtggtaaacgttcacgaatttcttcgtcactcttattcaagtatttttgtacggcattaacaatatcggcaaatgccattctcttgccattgtcttccaaaattgcacgagcaacttcgatcattgacaattcatcgcgatttttgtctttaaatttgtctaatcccacagctgtacgtcctctcttatacaatctttactattctactaggcctttaagtaaaaaccaacgtgactgcatagttacctattaagtatagtccattaaagaggtcatattcaacccgaagtttacgtgagccatcatcttgactctgatattcaagcaaattagtcacgctagtcatgtccatgcggcgccctccaactacatagcggcagttgcctttttcacccggaataaatttcattaaagaataattattgctgtcaacgccgcggcgaatcaacaattcattctcctttagaagcatcttcactggaatttgcccttcttcggcataagaaattcgtgtgacgtcgccttcttcagtcaattgcccttgcgcatgtcgcgtaaaagtctctgtctcatcgtcttgagtaattttactagtcaaatcaatcgtaattgctgtcaaacaagcgccccctttaaacattattactatatctctgatataattttagttagatataatctattttattatatatagttcaaaaaattgagactgtaaaatagtttgtgtaaggatgaatgattccttaaatttatttctttaaacattagaaaaaggagttcctttctcgtatgattggtttgaacaaaaaacacatacagaaagaagaactccttcatgaatgattttaccaaagattttgctcaagctctattcaatccagacaaaataaatgatttattgcgcaaagagctacaacaggctgttaataacttgctagaagctgaattgactgcctttctgggctatgatccctatgccagaaatggctggaatactggcaactctagaaatggtgcttatttccgcaaagttgatacgcaatttggcccaattgaagtgcaagtgcctcgggatcgcaacggtcaatttcatcagcacacgctgcctgactacaagcagcactcggatatcttggaaagcatgattatcaagctttactccaagggcgtgaccaccagggaaatagccgatctaattgaaaagatgtatggcagccattacagtccagctcaggtatcaaatatttccaagcagatgattccaaaggttgaggcttaccacaaacgcaagctaagcgacaagtttttctgcgtctatttggatgcgacataccttcctttgcgccgagaaacatttgagcgtgaagcagtctatattgccattggcatcaagcctaatgggcacaaggaggtcattgactactgcattgcacctagcgagaacattgaagtctggacagatatgcttcaaaacatgaaatcccgaggcttaaagcaagttgagctttttctttctgatggtgttgttggcatgaaaacagccttggccaggacttatcctaaagctcattttcaacgctgtttggttcatgtcatgcgcaatatctgcgctaaagtacgcgtcgacgatcgtgaaaagatcatgaacgaattcaaacaggtgcatcaacagacaaacaaagaagaagccacagctgtcctgcatgacttctataccaaatggggcaaggtttacagccatgttatcagaagcttgaaagacatagaaccagatctgctggtcttttataactatcccaagcagatcagagcttcaatttattcgactaacatgattgaatcatttaacaatgtgatcaagcgcaaagctaagcctaaggcagagtttccaactgaacagtcgcttgatgcttttattggcattcaggcaatgagctacaatgaccgttatttcaatcgaattcataaaggctttggtcaggttcaggacaccttagaatcctactttgattaaataaataattaaaaaatcaatttacgagaaagaactatttacacaaaagatttgacagtttcaaaaaattaataaattaaacttggtggatttttatgacaagatttcaaagcgaaaaattaaaacaagaggttgttctccgtgatccggttcacggctatattcatattgaagataaagttgttttggacatactgaagtctaaagaatttcaacgcatgcgtcgcattaaacagttaggtcctgttagctatgtttttccaggtgcaactcacactagatttgagcacaacttaggcgtttatgaattaacgagaagaatttgcgatatctttagcaaaaaatatccctcaattacgccaggagacggtctctggaacgatgataatcgattactggtagaatgtgccggattgcttcatgacatcggtcacgggccctattcgcacacattcgagcacctttttggcaccaatcatgaaaaaattggacaaaagatcattactgaccctaatacagaaattaaccatgcattaaaacaagttgcacctaactttcctgaattagtcgccagcgtaatcgctaagacttatcctaatccgcaagtggttaaaatgatctcaagtcaagctgacgctgaccggatggattatttgcagcgggatgcttatttcaccggagttaactatggtaggttcgatttatcaagaattttacgggtaatccgtccttatcaaaatggtatttgttttaccaacaatgggatgcatgccgttgaagactatatcgtgtcacgctatcagatgtaccaacaggtctacttccaccgcgtaggacgctcaatggaagtcatcttgcatcaccttttagagcgcgctcaaactgtttataaaaagggaaatctgcaagttacacctagcttgactaaattccttgaaggcaattggactttagacgattatttaaagcttgatgatggagtaatggaaactaatttttctatgtggacccaggcacaagatccaatcttatctgacctagccaagcgttacttgtacagaaaaccgctagctagtgtccgaatcgatgaagaaaccaaaaatcttttacctaagctcaagagcctaatcaagcaagctggctttaatcctgactactataccgctaccaattccgcattcgatgaaccatatgatgcttataagccaacggggaaaaatgctaatagtcaaattgaaattatgcaagacgacggcagcatgattgagttatcccaactcagcccattggttcgcgcattaaatggtactttccaaggagatgaacgcttcttcttccctaaaactatgctcagtcacgatgaagatcagccgcaaattttcgatccactttatgagcaatttcaaaaatatattaagaatggtgccttaagatatttgagaagaccaaaacgtgagcaaaagaagtaaaattaaggtaaatcttagaatcgaggtatttatgatgaacagacatgatttaaatacagatgtaagaactcaaattaatccagaagatgaagtaaaggcagaacctaagagcggctatactcaagttaaagacttgatggacacagttcatggttactgcatggactatactaaaatgtcttttgacttcattcatgaaaataaggatttggtaaaagacgtagtcaagattggttgtaaaaccgccatggtagcttgcgttgctggtgccagcattgcgattgccaagattgtttctggcaaagattaaattattatttagctcatgtaaaaaagggatgcgacgcatcccttttttgtgttgcaatatttacctaacttcttcgtcatttaattccaacagtaatgcataaagtgcaccatataagttagaatcattgccatgcttagcagccacaatcaccggcttaatcacttgattattcaacattggattattctgcaaaattttatcaaattgattgttaatttcttcaatcaaaattggctgtgcactaatcccgccaccaataattactttagagccattgattactgcctgaatattgaggatcatgattgctacattgcggcaatagcgtttaaaaacggctagtgctcttaaatcgccattgttaattgcctcaaacgcggtcaagccgttatcaagatcgatattccccaaagccaggttaacttttttgatcatattaaccgcagaacaactaaagccagcataagcagccatattcctagtaccaatacttgaattcgtaatcatccaactcaattcgccagcttgaaaagtccagccatgtaaaatacgattatcaactatgacaccgccgccaacagcagtgcctaaggtaattgcgataccagtattgacgtcatgcaattcgcctagccattgctctgacaaagcagctgctttaccatcattttctacgccaactggtacatcatattttttacctaaagtctcttctaaattcaagccatctaagaatggcaaggctccaccaaaatagataattttattcttagtatcaatcttaccaggagcacagactgcaatgccagcgaactttccttgatacttgtcagcgacttcatacatcgtctgcatgaatgcatctaggttttcagtattagtctttacccggtctttttcaagaatatgcccttcttgatcaattaatgcatatttcaagttagtcccgccaatatcgaagaaactgtcaaatcttttgtgtaaatagttctttctcgtaaattgattttttaattatttatttaatcaaagtaggattctaaggtgtcctgaacctgaccaaagcctttatgaattcgattgaaataacggtcattgtagctcattgcctgaatgccaataaaagcatcaagcgactgttcagttggaaactctgccttaggcttagctttgcgcttgatcacattgttaaatgattcaatcatgttagtcgaataaattgaagctctgatctgcttgggatagttataaaagaccagcagatctggttctatgtctttcaagcttctgataacatggctgtaaaccttgccccatttggtatagaagtcatgcaggacagctgtggcttcttctttgtttgtctgttgatgcacctgtttgaattcgttcatgatcttttcacgatcgtcgacgcgtactttagcgcagatattgcgcatgacatgaaccaaacagcgttgaaaatgagctttaggataagtcctggccaaggctgttttcatgccaacaacaccatcagaaagaaagagttcaacttgcttcaagcctctggacttcatgttttgaagcatctctgtccagacttcaatgttctcactaggagcaatgcagtagtcaatgacttccttatgtccattaggtttaatgccaatggcaatatagactgcttcacgctcaaacgtttctcggcgcaaaggaaggtatgtcgcatccaaatagacgcagaaaaacttgtcgcttagcttgcgtttgtggtaagcctcaacctttggaatcatctgcttggaaatatttgatacctgagctggactgtaatggctgccatacatcttttcaattagatcggctatttccctggtggtcacgcccttggagtaaagcttgataatcatgctttccaagatatccgagtgctgcttgtagtcaggcagcgtgtgctgatgaaattgaccgttgcgatcccggggcacttgcacttcaattgggccaaattgcgtatcaactttgcggaaataagcaccatttctagagttgccagtattccagccatttctggcatagggatcatagcccagaaaggcagtcaattcagcttctaacaagttattaacagcctgttgtagctctttgcgcaataaatcatttattttgtctggattgaatagagcttgagcaaaatctttggtaaaatcattcatgaaggagttcttctttctgtatgtgtttttttgttcaaaccaatcatacgagaaaggaactcctttttctaatgtttaaagaaataaatttaaggaatcattcatccttacacaaactattttacagtctcatatcgaatgataaatattgtgtcataattttgtcctctttaaatgaaaaacatctatctctaattatagatgtttctcatgtgtattttaatacactcttatttattataaatggtgatgattttttcaaaaaaaataaaatgactaacctcatcggctagccattttttattatcaaattttatcttacttgttcttgtcagcttcgtatctggtgttgaacaatgggctaagtgcttcatggttttggatacacttaatagcatcgcccatcaatggaccaactgataccaaaagcatcttgtcaagcttcttctctgctggttgattgattgaatcagtcaaaaccaaattcttgattggtgaatcgttcaatctcttaatagctggaccagatagaacagcatgagttgcactagcataaacttcagtagcacctgcatcaattaaggcttgagcagctaaagtaatagtaccagcagtatcaatcatgtcatcaatgatgatagcacgcttacccttaacgttaccgataatgttcataacttcagcaacattagcctttggacgacgcttatcaacgatggcaattgggcaacctaagaattcagcaagctttctagcacgagtaacaccaccgtggtctggtgaaactacaacagcgtccttctctaagccgttacgcaagaagtagtctgccaaaagtggagcacccattaagttatcaactggaatatcaaagaaaccttgaatttgtggtgcatgtaagtcaagtgaaagaatgcgatcagcaactgcagcttgaagcatgtctgcaaccaatttagcagtaattggttcacgagcacgagtcttacgatcttgacgagcataaccgtagtaaggcatcacaatgttaattgtacgagcacttgcacgacgtacagcgtcaatcataatcaacaattccattaaattgtcgttaactggcttactggttgattgtacaaggtagacatctttaccacgcacagtttcatcaatattaatttgaatttcgccatcactgaaacgttcaacactagacttggaaagtggaacacccacacgatccgcaatcttttgtgctaatggtacatttgagttaagggcgaagatcatcatatcgtctttataggacataatttcctccgtaaaaatatttaaccagctctattttagcaaaagttgctctaaaaagaaccacattctccttaattatagcaagaattttgccgcaaccataaaaaagcactaactattaatcgctaaaaaagttagaatacgcgtggtgctagttaaatcgttctagacaataagccaaattataagctaaaattgcaatttccaaccggctttgaaagcctatcagactacgtgctcgattgttctcggcattgtaataggtcagaagcgaaaagtcgctttcaattgttctgcgaatagccatcaattgatgatcattgtgctttttagctcctgtcatatttttacgatatggtgtccaaagttcgtaacccatttgttttagctgttgatgcagttctttgcctaaatagccttcgtcgccaagaagatagtaattagatggatgggtattttctatcagttcaactgtctccctggcatcatgaactgatgcctttgttacgacataatcaagaatgtaaccgtcatcgctaacaatggcatgaactttgaaaccatagaagtaaattttcttggtggccttataaccaatgttggcataaccgcgaaaaattttagcacgatagtttcgaattggttggcaaacaggtaccggaaagctgtcaatgatcaagaactgtccattcaggtcaacctttttattcatttcttgccgtatctgataaatcaattgcaatagctgacgtgaacgccgattaaaacgtgagtgtgataaacaattgaaacattcacagaatcttctttgtgattcaattcctgtcttagcttgccagataagtaaagccaaaatcagactgtccgtagttttaatttgatcaatatttcgccgatgagtaaactcagccggtgcatacaaacgataccagtgccgacaaattatcactaaatctttaaaactaacttgtaaatggtggctaaaacgcttaagcttaaggcagttcaatcagatcagactcttttctattattactatttacaagtcgagtctaacaagattggacttttttattaactaaaacgatttaactagcaccacgcgtattagaatatatttgtactttctagtacaacgaaaatatcctaaaaaataagacgtagtgtcattttagatactacgtcttattttatatatttttagttgtttgcaactgcagcttgtgttacataatcgcctaagttcaaaatttgtgcagctccgttaacactaattgataaactaccgttagtagttaattgaacagaactttctgctacattattagcattagctacaaccttaataatagctgccatttcatctgaagttaaattggtcatgttagcaacagcaactctcttgccatcaagtttagcctttgcactaacaatagcagcatctgcttcgttaacttgagcaatagtagctgtagcatcgttgttaacagttgtaccatcactgattgccttgtcatatgcagcctttacatcacttgaagcgagcttgtaagcttctgaattcttaacgctagttgcttcattaatgtcttggagcaacttagccttgttagctgctgtggcaacagtaacgtcttctctagcttgttccggagtgttaacaggagttaatgtcttaccacttacagcaacgtctgaagcctttaaatagcctctaccgcttgataatttatagaataattctggagtagcagttgcagaagttgcaatatatctcaattctgaaacttgttgactttgaccttcgccaaatgctctaacgttatctggttgtcccttaatgttgtaaagtggagcaacattaatcgtagttgccttggttacgtttggatctacagtattatcaccagtatcaacagtagcagcaccatctggttcgttaactggttctagttctgggcctgaaattttacctacattagcagccttaacgaattgattatcactaatcttgtagtaaagcttagtaccaatgtatcttgcttcagtagctttaacagtcttacccttcttaactgtcttcttcttggtgtcaccgttaccattgtagatgtaagcattcttcttcatggtaattgaagttgccttaacggttctagttacattacttgccttaacaaaagcagtgcctttcttgtcaagttggtagtaatccttacccttaatggtttcaatgccataaacatcaattgcggcaccctttaaaagcttagacttgccttggtacttgttgatgcgcttaccattcttatcataaatataagcattcttctttaatgagtagtcatattttttaattgattctgcatcatttgaaacagatgattcttggtttgaagtggttttaccatcaatgttaacagttcgtacaaaagcagtacccttcttgtcaagttggtaatacttcttaccgttaatggtttgaataccgtaagtagtgactgaatcacccttaacaaacttagatttgccttggtacttgctgatacgtttaccgttcttgtcataaatgtatgagttagaaacaaacttagccttagtaccctttgacagtgatgaagttgatgacgcagctttaccatctacgttaacagccttgatataagcaccaccaccaagatcgtagtactttacaccattgatagtcttagtgccagttgaagtaacagttacgcctttagcaatagtagtgtattttgcactgcccatgtacttatcaagacgcttaccattcttatcgtacacataagcattacgtaccaaagtgatcttgttgcttgctgccttctttgaagtagtcttcttaggagcagcttgaacagtgttgacgttttctgcagtacccaaaagtggagcaacacccatcaatgcagctgctgagaccataactaatttatgacttaatttcatcgataaatacctcattcttactaaacttaaagttcatttatatattgtagatctaaaatatttttttgccaatttagaaacgaaaaagtgtctttttcctatcaattattacttaacagttacatctgaagctttaatgtaataatgatttggttgcaaagcataatatttaacaccattaatggtcttagtacctaaacctttaacagtgatctttttaccaatgtaactagtgcctaaatagttttttacacgcttaccattcttgtcgtaaacgtaagccttattcttagtagttatcttaactgccttagccactggcgtcttctttgatgaagttttcttagtagtcttttctgagttgctttttttagtagtcttagtggcagtttttttagttgattctttaactacttttttagtgtttttatttgaattagtcttcttaacagccttcttagttgaagtagaagttgttaccttcttgccatcactctttaaagtataagtagtattgcctgacttataagttactgtaccttcagttgcagttgcaggaatccagtacttcaaatcagtttgaatactgtagtaaacttgaccgtcgatattcttgacgttccaaatagtgtagctaccacccttaggagcagtcttagaagttttcttaccattacggtcgacaaacttcatagtcttagttactttgactttgctgtttttaccgtaagtattatgtacgccattagtactcttagtagcagcttgaacagatacagtattttctgccatgcctaatactgggctaacacccatcaaaacagctgctgaaaccataactaacttatgacttaatttcattgtattacctacctcatgtaaaaattattattagtacaccttattgtaggtctcaattattattttgcaataagtatttagcaattgtaagtgtcaatgtttttgcggtagcctttaaaccattagtctaaccttaatttcttaaatatttatatgacttaaatttctgcttagcttgcttaaataactattgccagctacctgtgcggttaatgcgccatgctggatgcctaaatgaacttcatgacgcttctttaagctgtcacgggccgctgcttttaattcctgttcagtcaatacagttatttctgaatcttcaaactcgctgctaagccaaaattccagctctcgattcttgatgcagcttaagatcctaagcatgccttctgctccagattttgaccatttcttgccttgccccttaacacggtaggtatacttgcggtggttgctctcgcagcagccaatggctttagtcacagtcagttttcgtttcttaaacggcttaatatcgtcccaatgacgatcaatataattccttaggcgccccagataatcatgattgagctcggtattcaattcatcagttagtcggctttctgcagtggttaggatagttttaactttgtcatagctgtatttgtattccaaagcagaaatcagcttgccttgcaggtcaggcgcaaaatatagcctttctttgattttcttatttaggtgaaagacatccaagaaatgctcatgacgcttgcatagccctacaatgtcatcgaagtctgttttggcatatccagcaccgccatcggcgttgctaagaattacagtatcagaaagatcataagtattggccaggtactccttggcttcgttcagcgcatcaagtcggcttaaagaaacaaattccttggcattgattcgctttctgcgtttcttgcttatattgacaatgccttcacagacctgatagcgatgaaattccaaccggcttttagtgcctttgatcaccacgccatcgccttcaagatacaaaactgggacctttttcttagtgcctgcggcatcatatcttgaatctgcttcttggccagctttaatatttttcccggccatttttaccaaattgcccacctgcatatggctaatattaaagccagacaggcaattgactgctagagcagtattgcgataagtggcaacgctgcttacttctaagatgtttttgactgctaaaatactgtagcgcttgtatttgtaaaagcccattaattcatccaagggataccttgcttgtttgcctgggcagacatatcttcttctgacatacctaacttcgccaaaagccatattgattgagcgctcattcttcttatcaatctgatagccctgtgctttaaccttggtaatcatttcatcatcaactttagctaaagccaaggccatgatttccttaatcaggtttaagaagaaacagattatttttctttcacgcttaatataattatcttcagactttataatatttgcgatttcagttacaattgaattcataaaagaccagcttctaatgtgttttttgttcttaacatcagactactggtctttttgtttgagctcaagtccaaattcaaaggacttgggcttttttaattatttattcaacttaccgtaaaaaattatacacttagttagcaattcttaacaaaaaagcactagcttgatacactagtgccttattcttaatcccattctttatcttgagaaagaggaagcttatgccaataatctggcttattaacttgacggccacggccaattgccatgtcatatttattaacgtccttagtaacagtggtatcagctgcaataaaggcgtgatctgcaacattaattggagcaatcaatgttgagccagcaccaataaaggcatgatcaccaacattagtatggaacttctttacaccatcgtaattagagaagatcgtaccacagccaatgttaatgtctttacctaaggtagcgtctccaacataagtcaagtgacctactttagtattttcaccaatctcagccttcttaatttccacaaagttaccaatatgtgcacctttgcgaataattgccttaggacgaaggtgtgaattaggaccgatgtcagtattatcgtccatttcagcttcttcaacagttgaagaagtaacagtgacattattaccaatcttagaatcaacgattcttgaaccactagtaatgtagcaatcactaccaatttcggtgtttcctttaatcacaacattaccttcaattacagtgtcgttgccaatcttaacatctgcatcaatataagcagtatcagggtcgataaatgaaacaccatcacgcatatgctgttcattaattcttctttgcatagtcttagtagcttgagctaatgcaatacggtcattaacgccaaggctttcactaaagtcaggcatcttgtaagcaccaacgcgttcaccactattgcgcaagatttctaaaacatcagttaagtaatattcaccttgagcattgtcattattaacgtgcttcaatgcttcaaataattttttattgtcaaagcaaaatacaccagtattgatttcttttacttttaattcttctggtttaccatctttttgttctacaattcgtaaaacattgccttgatcatcacgaataattcgaccatagccaaatggatttggagcttccgcggtcaatacagttgcagcattgcctttttctgcatgatacttgaatagttcattaaatgtatcagttgtgaaaagtggtgtatcaccagtaactactaaagtagcaccatcattgtcacccaattcttcacgcgcagtcattacggcgtcaccagtacctaattgcttttcttggaaagcaaacttagacttgtctgccagtactttttctacatcgccagcacctgtaccaacgattgtaacgatttctgcaggattaacgccttgagctgcatcaacaacatgctcaaccatggttttaccacaaactttgtgtaaaaccttgtacaactttgacttcattcgtgtgcccttacctgcggcaagaacaactacatatttttccattaatattaacctcttaataatcaaaacttgattctagtataccattttagaaacggtcaaaatcagtttcagttaagaagttaccaggttctgctacaatcagcttttgggcagtatcaatttcactaatttttactaatgaaagatagttcttaatcagcttttctttgtcaaaatcggcttcacagagtacacaaacgccggcaatagtaccatcgaattccttaactaattcttccattccggttagggtaccgccacccttcataaaatcatcgacaattaaaactttagcttcttttttaagagcacgagtcggtaattccatcttcgatactcgagacaacgatgaagaaatatagttaacagaaacagtagcaccttctgttacctttgatcgctttctagctgtaacaaatggtacatctaaaaaacgagcaactgctttggctaaagcaatcccttttgtttcaactgtcatgacagcatcgatttcttcataagcataatgagtagctactaattcaccaattttacgtaaatcttgcgtattgcctaaaatatctgacagatacacaaaaccaccggctaaaattctacttggatcctcaatcctagttgataaatctgacaaatatgcttccgcgtgttttttacctaaaaatggaatatagcgcacgccaccagctgcaccggctacagtctccaaaataccatcttgattgctggcaagagtgtgcttcaaaatagctaaatcttctgaaatagatgacttagcagcgccgtaacgcttagcaaagaatggtagtgcaattaaagtatggggacgctccattaaatatttggtcatgtccaccaatctttctgaacgtttcatgaaatctcctttctaatgtttggtttatacttaattaatatactctaaagggcaaaaaaaagcactaacattttaaataaatgctagtgacaatttcaaaaattgtgtttaagcttcagcctcttcagcttcatcatcaaactctaatgcaatattcttagttagtaaatcggtataactgtaagaaacatgtttaaaattattttgatgttggtctaaatcaaccacaaacactgcagggaaagtctctcttagaattccccgtctcttagtaactttcttacgacccgcttgagctactactgttaaagtatcacctaagtgagaatccaacttatgtttaattgtgataattgatgttggcactaaacaacagctcctttagcaacattttatcacaaatatataataaattcaatattatacatcatcttgcaggaataaagctagcaattttaataaattgtttaattgttaattcttcagggcgaattcttggatttacccctaattccgcaaataattcatcacgcttagttttatcaggcaacaaagcttttaaattattattgagtgtctttcttctttgtgaaaaacacattttcactacccaaataaaatgcttacgattttcaattgctggcttttccttcagtggcgttaagacaactacgctcgagtctacttttggtcgcggcataaaggaattatgactcacctgcaaagcaagtttaacattcatttcggtctgaacggaaatagtcaacggaccgtattccttgctgcctggttgggcttctaatcgttctgctacttctttttgcatcattaaggtcaatgaagtaaagtgcaaatctgattcagctaaggcaaaaatgattggcgtagtgatgtaatacggcaagttagctacaactttaattggcttagtaaaatcaaagaagtcactaatatctaccttaaagtccgcttttaatacatctttcaagatcagcttaaagcgactagccaaaggctgatcatcaattttcttaggcagttcattctgtaaaatcgtaggtaagctatcatcaacttcataagcaaaaactttagcacctgccaacagtagttgctcagtcaaagagccaatacctggtccaatttcaatgacttgatcatctttttttatcccagcagcttcaacaatacctaaaatagcagtctgatcaactaagaaattttgccctaagttctttttagctttgacaaagtaacggttaacaattgcttgtgttctaactggagagccaattggaatattatttgtcattttctacctccttgacagctgcctttaattcagctaatgaaacgccaaaagtatgcaagcgattataaaactgcttggaattgccatagccaactcgtaatttaatgcctacttgttcacgtaattttcgtgagccgctaccaccagctaaacctaattgccgataaattgctggagttaaatcacttttttgcggttcaacctcatgcaaatcacttagtgcatgctcaagtgcttcttttgaagcatgttctacacctagactcccctttttatgaggttcgccttccttacgggtaataaaagcttgctttgcatcaggaacagctttagttacaatgcgccggattctttcgccattaaagtcaggatcagtaaagacaataatttgccgactctcacttaatttttggatttgcttcaatacttcatctgaaacggctgatccattagtctcaattgtctcgattcctgggaaaaattgttttaaacggatggtatcgtctttcccctcaacaacgattaccgcatcaaaattctttttatttaagcccataaactctcactgtgttcttataagtagcatccgccactttctctagtggaatatccttcaacttagcaattgcttctgccacataacgtacgtagccagtttcattttgatgaccacgatatggcttaggcgttaaatatggcgcgtcggtttcaactaaaattcggtcaagtggcgcagcttttgcactctcgtgtacttccgtagccttagtgaaagaaacaacacctgaatatgaaaagtaaacattcaaatccaaaaacttatttaaccagtcaacaccaccgttaaaactatgcaaaacagcaccatattccagattgctatttttcaagatgttataacaatctccaaatgcatccctagtatggatatcaactggcatcttcaagtcatgtgctacttcaatttgccgcgcaaaaacattacgctgtacgtcgcgcggcgattcatcccaataataatctagcccgatttcgcccattgcaactaccttaggctgcttcaattgttcaattagtttatcttcagcctgttgatcatagtctttagccacatcgggacagtaaccgaccatcgcatagacattatcaaacctttgtgctaagtcaaccgctctttgattaaagtcaggatcttgccccgcacaaataaccttggttacatcaagtgcttttgctcgttctaaataatattgttccttgccgcgaaacggctcgtcattcaaatgagtatgattatcaatgatctccattagccgagttcagccccaactgcatgttcatcaccaacaagagctaacttaattttgccatgcttttcacttgataagagcatcccttcactaaggtgacccagcatcttacgtggctttaagttagtaacagctaaaacctttttgtctaatagctcacttgcatctggataaaacttgcggataccactcaaaatttgggtttccttgccattaccaaagtccagcttgaacatgagcaacttgcttgagcctttaactggttcaactgacaaaatttggcctacttggatcttaaccttgtcaaaatcgtcaatggtgatttcgtcacccttcttttgttcacttctagtggtcttctttggcttagctttagccatttcatccttgatgtacttaacttcttcgtccatcttaagtcttgggaaaattggttgtggtttttcaattactttaacatcccaatcaaagtcaccaaaggccaaatgcttagcgtcttcattgtcccaatttaaaccaagttgcttgaacataattggtgcagtttcggtcattactggttcaatcataatagcaattaaacgcaagctttcagccaaattgctcatgaccttgctaagttcttcctttttaccttctttgttcaaagcccatggagtagtttcatcaatatacttgttagcacgagaaaccaacttccaaatattgtctaatgcctttgaaaagtgaagtgaatccatattttcgcgataatcattaatgacactagcagctgtatcttgcaagtctttgccaaattcagcttgagcaacgggaactgcatcaacatgaccagcttgatattgattaatcattgacacggttctgttaagtaagttacccaaatcgttggccaagtcataattaattctttcaacaaagtcttctggtgtaaaaataccgtcatcgccaaatggaagagcacgcatcaagtaatagcgaagtggatcaacaccataacgactagtcaatgattctggataaacggcatttccctttgacttagacatcttgccatttttcatcaatacccaaccatggccgataatgtgcttaggaagtggcaaatcaagagccattaacataattggccaataaatagtgtggaaacgaacaatttccttacctaccaagtgaacgtctgcaggccaatatttcttaaacaatgaatcatcgtctgaaccatagcccaaagcggtaatatagtttgaaagtgcatcgatccaaacgtaaaccacgtgtttaggatcacttagaacaggaattccccagttaacagtagtccgggtaactgataaatcttccaaacctggcttaatgaagttattaagcatttccttttcacgtgaatgaggcaaaataaattcaggatgttccttgtagtattccaccaaacggtcagcatacttgctcatcttgaagaagtaggatggttccttaaccaaacgtacttcatgaccacttggagccttaccgccgattacattaccatcatcatctttgtaaacttcagcaagctgtgattcagtaaagtattcttcatcttcaactgagtaccagccagtatattcgcctaggtagatgtcaccttttgctaataatttttcaaaaatcttttgtacggcagctacgtgctctttgtcagttgttctaataaacttatcgtaagaaatattgagactcttccataatttcttgtaagaagccgccatcttgtcgacgaactcttgtggcttaattccttgtgcttcagctttttgttcaatctttaagccgtgttcatcagtaccagttaaaaagaaagtatcgtagccttgactgcgcttgtaacgagccattgtatcagctgcaatagtagtataagcattaccgatcgttaagcgaccagatggatagtaaattggggttgtaatataaaaagtatctttatcagccattgattaatcaaactcctttaatcgtctaaaatatctattttattttaacatgcaaaaaaaaggaattgggctaaaaccagcaattccttttaattcaaatcagaatttttctttttttaaatataagtgcttaaccaaagtcgtcagtaaaatgtagattacttctagcaagaagactatgccccaataaccaaacggcaattgagctaggcccaaacttggcgcgatacttgatgaaggcaacattgtaccaataattgccataccaatggtcaccaagaacaccactggcgtggcatgttgcttaaagaatggaaaacgttcatcacgcaaagtgtgaatcaccataattcttgtccaaagcgattccacaaaaatccccgaataaaatagtgtcataaagacccaatgatgataattagaccctactaaatatggacaaatcacataaaacatcaagcccattgcgataaaatcaataattgctagaatcggaccaaaattaagtacaaacttcggccatctcttaatcgaccatttttgtggctttttgacatagtttttagaaacactatcaaagggaataaccagacaacttatgctaaacagcaaatttaaaattaaaacttgcaatggcaaaagaggcaaaaatggcaagagcagcgatgaaacaaccatcgcaattacactaccagcgttagttaccaagaaggtcttaatatatttcattgtatttgaaaagacttttcggcccattagaatcatttcttctaacagctgcaaatctttttgctcaaaaataatatcggctgactctttgataatatcaactgacgtattcgaagttacggtcacatcagctaccttcattgctaaagcgtctttattgccattccccatataaccgactgtatgaccgtttgctttgagtgcattaataatttttactcttaattccggggttattcgcacaaatatatcgcatttttcaacaatttcacgcaactcttccgggctaaccgcttcgatctgggtgccgtcataaacagtatcaacgtttaatcccacctgcaaagcaatagcacgagtaactgcttcgttatcaccagtaaaaatcttgacatcaacataatcttttttaagatcttccagcgcttctttagttgtttcttttggcggatcaagataagccaaatagccaataatggttaaatcatgttcatctttagcagagaactcacctactggggcaggatttaatttataacctactaaaagtacccgtaaaccgtcatcgtttaattcattaatctgatttaagatcttttctcgccaggcagtagttaaatcctcaaccttgccattaagttcaaccttattagaaattgccagcatcccttcagcggcacctttagttactaataagtgctgcccgtggtgttcatcgttatctaccactaccacgctcattctttttcgagtgtagtcaaagggaatttcgtcaattttattgtaatcacgctgaatttcgtttacatctagttcatcgcccgcggcatcaattaccgccttatcgattaaatcttttaccccagtttgataatatgcattcaaatatgaaaacttcaaaatctgtggggtttcttgcatatctaaatcatagtgacgctctaaaaccacttgattttgtgtcaaagtcccggttttatcgatacagaacacatcagttgagcccaaattttgaatagcattcatttgcttaacgacagcaccattttgggatatttcccgtgcgccccgtgttaaattggaattaacaataatcggcaacacttctggtgttaagccaactgccgctgtcaaagcgaaaattaagctttcccccccaattccccttagtcaggccattaatcacaaacaaaagcggaatcacaattgctgtcgcgataatcaatattttagctaattgcttcatttcccggtcaaacagggtagtttttacttttttacgggaaatagcctgaactgctttgccaaaaacagtgtgattgccaattgcaaaaacaatcccggtgccagagcctgaaacaatagttgttccctcatatagaatattagggtagttcaaataatcattagccatactcggcttaattactacattagccatcttttctgccggctcaggatccccatctaaatagcttgatgagcaaaaaagatctttgctagttaacaacttcatatccgctggaatcatatcaccagccgacaagttaattacatcaccaaccactacttcatctgttggcaattccacatttttgccatcacgccggatattcgttgtaactgataccatattgagtaattgatcagttaccttagcaattctgattttttggataaaattgacgagaaccgagataatcaacatcacgatcatcactatcgtagtaattaagtcattatctccttgtggcaccaaaatatagctagtaaacagggttaataaagttaatactaataaaaccaacgtaaatggcgtagcgattgattcccataataagcgccatttagaggaattgctattagtaatgatttcgtttttgccatattctcttctgttttcttcagccttattagtcgaaagcccttcagcactcgcctgtaaacgcgccagcgtctcgctacgtgactcacgcgcaatccgttgaatcctttgaatgtctatattcgatcgcttcttgctagctgcttttaacattatttgctcccttctttaattgggacaagcaaaacaaaaaagccacctgtaactctgcaggtgacttttgccaaacaaggctctgtcatactcgtcgttcagttttaacactacgtgacgtaagcacatgctagctatctggatctcgccttaagtcgacgacacctatttaacccgttggcatctctggatgtttctgggcgatagcgtgtgttcacgtaggagtttcacctaacagtttttcgctaattatgtctataaaaagtgtaaggacaaaatgcaaataagtcaagccgactatttcttagaaattggatcacgatgactaaatctacgcaagaaataagtaattcccgtaattaaaaatgccagtgccagtgcgattggtaaagctacactatgtggacgcgcgactttattttgttctgcttgcgtcaaatcatatttatcaagtgcatattgatattgttgatcaactctagtcgcacatgcccgaaagacgaagcgaattcccttgttaaaagttgcattattttgactacgcaatttatctacttcagcacgcaagatattgccccgagcgacctcggtgaaggcactatgcaaatctttagttgaataaatttgcacattacgctttttacctttctgtcctaccacaataaagaccgttcgcttagaatgatctagcatcttaggtgttaacttattcagccttttaaccgttataacgacaatttgcggttgttctttagtctgaaaatagcgattatttttttccgtaatcaaagtgcgagtttctttatctaaaatatgagcatgatcttcaatatttggctggacaaatcctgtcgttattaaaaatacagttactagtcccattaaccaaattaaattaattctcgtcttcttcaagtttatgggccaagctttccacgtatttgcgattaatcttaatctgttcataaggcaccccgctatcatgaagtagttgcatcgccaatggattatcgcgatagtcaaaataatagttaatttttttcacgcctgcctgcaacaaggatttgcagcaattatagcaaggaaaatgtgtcacataaatctcagtattttctgtagaaacaccaaacttagcacactgaatgatcgcattcatttctgaatgaatagttctaacgcagtgaccatcaaccatttgatgacccacatcgtcacaatgcggttgtcctgaaacggaaccattataaccagtgccaataatccgattattttttactaagacgctaccaactaatgcgcgattacaagtagagcgttgcgcaattactagcgcctgcatcataaaatattgtttccaaggaattcgatcgtgcataactttacctcagccttatctattcttgaaatagttcaaaccaattgcgtcacggacttgttcaagtgttgcattagccactttattagccttttttgaaccttccagaagcatttcataaaccgcatcttcatcttgagcaaacttttcgcgacgttcacgaattggtgcaagctctgcttcaaggaccttgtttaagtaacgcttaatcttaacgtcacctaagccacccttttggtattctgccttaagttctgccaccttgtccttatctggatcgaagacatcaagatatgtaaagacagtgttaccttcaaccttaccagggtcttcaacgtgaatatggttaggatccgtgtacattgacataactttcttttgaactgtctttgcatcatcagcaagataaatcgcattgccaagtgacttcgacatcttcgcattaccatcaagtcctggcaaacgtccttgacctttaggtgggaaataacctttaggttcaaccaaaacatcacaattataaacacggttaaaagtcctaacgatttcacgtgtttgttccaacattggttcctggtcatctccaacaggaataacggttgctttaaaagcggtgatatcagcagcttgagaaactggatagtttaaaaagccaattggaatagagtctttgaaatctttttgcttaatttctgtcttaacagttggatttctttcaagccgagccacagttactaaatccatgtagtaagcagtcaattcaaatagagcaggaatttgtgattgaacataaatagttgatttagctggatcaataccaacagctaagtaatctaaagctacttggatcaaactattgcgaattttttccggattacgagcattgtcggtcaaagcctgtgtatccgcaatcataatatatggatcatatttacctgaattttgtaattttactctattctttaatgaaccgatatagtgaccaatgtgcagcttaccagtaggacggtcaccagttaataaaatttctttcgccatctttttgctcttttctaatttttaagtttatttttttattaatattaattgtttaattacctaattttaacaaaaaataggctatgattaaactagccctaaagaaaggaaatgcgtatgtgcaaccagtttcgtttacctaatttaaaacaaattcaacaatatctcaaaagcgatcttgacctgcccttagttacaccaaattttgacattcaagcacaagatatttttcctaaccaagtagcacctgttttgctttatcaaaatggtcaattgcaattaagcaacaaaaaatggggctatccaagtcccgttgatccaaaaaagccattatttaacgctagaattgagcgattttatgattcagcgccttcaatgtgggacaaatcctttgccaagcaacgttgcttaatcttaaccgaaaaattctttgaatacgctaaaactacccatattgctgaaaacggtcgtaaataccatgatcgctacgccttccgcactaatcaaccacttaccttaattgcaggtatttatgatcaggattatttttcaatggttactaccgcgcctaacaaagatatggcgccaatccataatagaatgcctctagttgttatgcccaacgaactacgccgctggctttttcaaaattttaccagcttaattgatcgtaaaagtgttgatcttcaaatagaaaaaatgctaaaataaaaacatattgcgggtatagttaaatggtagaacgacagcttcccaagctgtagatgcgggttcgattcacgctatccgctttttttatacaaaaaataaggatgagaatttttctcatccttttgtttttaaatcataatcactgtaagtacgccactaactacagctaagtaaattggcatcaataatgtttgtgtgtacatatagctccaagcaaacaccatgccataaattgcatcaataataaagagtactactgaattttgaaagttcagtaagctataaatcagacctgaaacaatgatccccataattgcaacttgcttagtatttcgccgaaaagcataattgaacaaaaagccagtcgccaaaaattcttgtaggattggtaatacaattccttggacaacgattaaaaaccaaaacatgttaactgattcacttttggcatatatcaattggaaatcataatgactaatcctgccatatgattgtaagtatgaaatcgaaatctgtgtaactgtaatcactaatgttaatagaacaacagttgacaaactgcccaaccatggaagtttataatcacgggcaaaaaagcgttgctctcgattgaaacgataaacataaaacaacagaatcatggctgcaactaagccgaataaaatcaaatcccaaatatgaaccggagattttctagtaactagctttactactgcaaacacagcgacatagccagctaaataaacggcatagcggatcacattaccctctcttgatcgtggcgtattcaaattcttcactcctactctgaattgtatcctacaaaacccatattataccagaaaaagacagtttattatagttctcaacttatttaacttccacaatcgttacttgatattcacctactggtgccgccaccgttgctgttgtaccagcctcctttttcatgattgcttgacccaatggagaatcaaaagaaaccttgccagcagcaagatcagcttccattcgcccaaccactttgtattcttctgtttcatcatcgtcatcaaacttaagcacaacggtctttcctagatcaaccttaccatcatcttcagctttaacaatttcggcatactttaattgtttgcctaggtaacgcagacgactttgtaagtgacctagatcacgttttgcttcagtatattcagtattttccgaaagatcacctaaagctcgtgcagcctgcaaaattttaattctacgtggccgatctttttttaatcgagcaatttcatcctcaatttgttgatagccttctggagtcattttctgaaaatataccatttctatttcacaaactttctttatttttttatacgtaataattatccataatctcaaaatgttattgtagcagcgttatcagtctaaaattagcactataaatttttaagtgctaatttgtgtcatttctataaaaagcgactacaataaacagtgtaaggagaaaagagatcaagaaatgagttgatcttttccttatattctaattaagcaaatacaaaaatgaaaggaagttttatttatggcaaacgatatgatgaatcggcgcaacgacatgatggatgcaatgaatgattggtttggttttccaagaaacttctttgacgataatgaaattgaaaacattatgcaatctgatgttgcagaaactgataaggactatctagttaagattgacatgcctggcatggataagcaggatatcaacgttaactataatgacggtacgttaaatgtcagcggcacaagaaaatcatttaaggacactagcgataaaaatagaaatatcattcataaggaaagaagtgagggcagtatttctagaagctatagattaccaaatgtagttgcaagtgagattcatgcaaagtatgataatggtgtattgaccatcactttgccaaaggaaactgctggcaatgatggcaattctatccaaattgattaatttattagatataggcaagaaatctaataagttgacggattaataattctctcaagcgagttctgattgaacccgcttttgttttgctttaaaatagaattaaattgagaaaaaaattataaaatgaaaaggagattttttatggctcatgaattaactgtgcaggaactagaaaagttctctgccgaatttaataaaaaacctgaaaataaagtcgttgctcgtgcagctcaacgcagtggtgtacttgaagcatcttataatgatcgtgttcaaggacaattaacccgcgtcttttcaactgaacttgatacaaataatgtcactaaccaaaaacattctggtcgttgctggctgtttgcgactttgaacgttttgcgccacgcttttggtaagaaatataaggctaaggacttcaccttctcacaagcttacaacttcttctgggataagatcgaacgtgctaacatgttctacaacagaatcttagacagtgctgacatgccacttgattcacgtcaagttaaggctgacttagactttgctggtagtgatggtggacaattccaaatggctgccgctttagttgaaaaatatggtgttgttccttcatatgcaatgccagaaacttttaacaccaatgatacaactggttttgctactgctttgggcgataagttaaagaaggatgctttagtattgcgccacttgaagcaatacggcaaagatgatgaaattaaaaaggttcgcgaaaaatttttaagcgaagtttaccaaatgactgctatcgcagtaggtgaaccacctaagactttcgatcttgaatatcgtgatgacgacaagaaatatcatttagaaaagaacctaactccacttgagtttttacacaagtacatgggcggcgttgattttgatgactatgttgttttaaccaatgctccagaccatgactataacaagctttatggtctaccagctgaagacaacattgaaggctcactgagaatcaagcttttgaatgtaccaatggaatacttgtccagcgctgctatcgctcaattaaaagacggcgaagctgtttggtttggtaacgatgttttacgtcaaatggaccgtaaaactggttaccttgacactaatttgtacaagttagatgacttattcggcgttgaccttaaaatgtctaaagcagacagattaaagaccggcgtcggtcaagtgtcacatgccatgactttagttggtgttgatgaagacaacggcgaagttcgtcaatggaaagttgagaactcatggggcgataaatctggtgttaaaggcttctacgtcatgaataatgaatggtttaaggactatgtttacgaagttgtagtccacaagaagtacttaactgaaaaccaaaagaagctcgctgaaggtccaatcactgacctaccagcatgggattcattagcttaacgagcaatgatcatataaaaaggcgatccatatcggatcgcctttttagcataaatataatattaatatagagagagttgcattagatttggtatctaattttcgtagcttgccgctacttcttcgtaatgcttgacttcatcgtcagagcagcgtacgaagtgtcctggacgaatttcatgcattgagcgttgctttccgtccatttcttctttttgagcgtcataaggaatccttgtccggctccgctcaacttctggatcaggaattggcactgcagaaatcaaactcttcgtgtaatcatgaagtggtcgatcatagacgtcatcggctggacctacttccagtagtttaccgtagtgcattacaccaattcggtcagaaataaacttaaccattgataaatcgtgggcaatgaacaagtaagttaaaccacgctttttctgtaattcaatcatcaagttaactacttgagcttgaattgatacgtctagagctgaaataggttcgtctgcaacaataaatttgggctctacggctaaggcgcgagcaatcccgattctttgacgctgaccacctgagaattcatgtggaaaacggctagcatgacttgcatttaagccaacagtttccaataattcctctactctctcagttcgttcatctttatttttaaccaaatggtgaatatctaatccttcagcaataatgtcctcaacagtcattctaggattaagtgaagcataaggatcttgaaagatcatttgtgcatcccgtgtaaaagctagtttgtctgcacgactttttaaatctgctacatttttgccttcaaaaatcacttcgccactagttggcttatacaattgcaaaattgagcgcccagtagttgtcttaccagaaccagattcacctaccaagccgaaagtttcaccttcatagatattaaagcttacatcgtcaacagccttggtgacattacgaccatttttaaagtattgttttagatgttttacttccaaaattttctttttttctggcataaaaatctcctttaccgcgactagttaacctctggcagtttatcttcttgtttcatcaagttatattttttccagcgacgtgtaatttcagctggtggttccactttaggtgcacctggtgctaaaagccaggttgcagcatagtgagtatcagttaccttgaaaaatcgtggctttctttccacatcaatcttcatggcatacttatttcttggtgcaaaaggatcacccttgggcggatcaagcaagttaggaggcgtacctggaatcgactccaaagtatcactgtttaaagtaggcattgaattgattaagccccaagtatatggatgctgtggatcataaaaaatttcatcaacaccaccgaattctaagaattcaccagcgtacattacagctactctatctgccataccggccaccacgcccaagtcgtgcgtaatgaaaataattgaggtcttaacccgcttttgcaagtctttcatcaagtccaagatttcagcttggacagtcacgtctagagctgtagttggttcatcagccagcaaaatctctggctcacaaattaaagcaatcgcaattacgattctttgtctcatcccacctgaaaactggtgaggatattgattaattcgttcttctgcatttgggattcccacggccttcatcatttccaaggctttagcccaagcttctttcttagaggcacccttatgtttgattaatggctccgcaatttgctgcccaatcttcatagttgggtcaagcgaagtcattggatcctggaaaatcatcgaaatttcgttaccacgaattttttgcatttctttttcagataactctagcaaatttttgccgtggaaatcaatctcaccgtcttcaatctgagcatttcgtgctaacagaccgataatacttctggtagtaaccgacttacctgaacctgattctcctacaattgcgagcgtctctcccttatttaggtgaaaggaaacgttacgaatagctttaacctcaccagcataagtgtggaaatcaatttttaaatttttaacatctaaaactctttcttctggcatttaggttaatcctttctatctttgtccccgtggatcgaaggcatcacgcaaaccatcacctaataagttaaaggcaatcatcaacacacacaatacgattgctggataccacatctgatatggcaagaattgaaaattcttttgtccttcgttcaaaagtacacctagtgaagtttctggggctgaaataccgattccgatgaaacttaagaaggcttcgaagaagatggcagttggaatagtatacatcgtttgaataatgatgatgcttgaaaggtttggcactaagtgtttccaagcaattttccaaggtgattcacctaatgatctagctgccaaaacatattcttcatttttcaaactcagagtttctgctctaacttgccgtgccattgtcgtccaacttgaaatagcaattgccaagataattgacttaatacctggttttaataccaccaacatcaaaactacaatgattaaattaggcacggaagagataatttcgataattcgctgcattacgttatcgactcccccgcctttccagccggacactattccgtacgcgactccgatagttaaatcaaagaaagctgcaactaaagcgacgatcaatgaaatctttgtaccatagataattctttgtcccaaagatctgcctaaataatctgtacctgcgataaaatacttatctttaggcacgccattctgggcataagcatcaacccacttgccattttgcttaatcttaccgttcaacccgttaattgcgctcattcctggcactttagcaggtaaattggcatattgtgggtgcgatttaactaaagtagatttattgatgaatggggttgaaccaaaagctactacaatcatcaaaataacaataattgcagaaataatagctgcttttctctgcttgaagcgaagccaaacattttgtgcaaacgataaagatggacctgcaatgttttcgttatcctgtgcttcatcttttgataagggttcaaaggcatctgcaggaaggtttaatttttcttcagtcatattgtcttctaggcctcgctttcatctaatctaattcttggatcaattaatccataaacaatatcagtaatcaacagaattactactaatccaatacagtaaaccatcgtaattcccatgattgttggatagtcgttagtcaaaatcgacttaacaaattgttcaccaatcccaggaacgttaaagatattttcaataaccattgaaccagtcatcaaggctacagcataaggaccaatcagagttactaatggaatcattgaattacgcattgcatgttttctaatgacttccattctacttaagcccttggccttacctaactcaatatagtcactacttaaggtatcaaccatactggttcggataaaccgagctgtttccgcaaatggtccaactgccaaagcaatcgttggcataatcgtttgagaaaattgcccccaaccagcaattgggaaccaacctagctttaaaccgatgtagtattgaagcaaaactgctaaaacaaagttaggaactgatttacccaaaatagaaattacagtagcagttgagtcaacccaagtaccctgtctcatagcagcaattgccccagcgattacaccaaggacaactcccaaaattaatgcttgtaaacctaattgtactgacgcacccaaacgcgccccaattaatgaagctaccggttggttactatattggaaggatgtcccaaaatcaccgtgaagcatccccgcaatataaatcaaatattgttgccagataggtttatttaaaccatactgttgatccataatttgccgctgagttagcgtcatctttgcttcattagcataaggtgaacccggcatcaatttcattaagaaaaaagttaccgtagccacgataagcaaagtgaggatcatataaaatatacgttttaataggtatctagccatattaattgctccctcattttattttatgctttcatttactttttaatgttgttttaattataccaaaagaaataaatatatctagttaaaatgtccaaaaaattaaaaaaataagagagaaattttgctttctctcttatttttaacttttattatatctattttgtatagtttggagcagctttggtcatttgaacatcatgtggatgtgattcacgtaaacctgcattagtgatttgaacaaattgagctttatcaattaattccggaatatttgcagcaccacaatatcccatacctgaacggagaccaccatcaatttgaaagactacatcagaaacatcgcccttatattctactcgagcttcaacaccttctggaacaagtttattagcttcgtttacgccaccttggaagtaacggtcacttgaaccgtgtgcttgggccatcgcaccaacagaccccattccgcgatagcgcttatacttcttgccattatcttcaaaaatttcgccaggtgcttcagtagtacctgatagcattgagccaagcatgacagcattgccacccgctgctaaagctttaacaacatcacctgaatatttaattccaccatctgcaatgattggcttgtgatattcacgtgcagctgtagcagcatcataaatagccgtgatttgtggcacaccaacaccagcaacaactctagtagtacaaattgatccagggccaataccaactttgacgacatcaacaccagcatcaaacagtgctctagttgcatccccagtcgcaacattaccagcaatcaaagttgcttctggaaaatgatcgcggatttctttgatcttgcgcaataccccagctgagtgaccatgagcagtatcgataacgatcgcatcagcaccagcttcaagcaatgcttctgctctttcaaaagtatcactggttacaccaactgctgcagcacagagcagatggttttgatcatcagttgcggcctttgcagcactagttggcacaactacgctctttacgttggctacttcaccagcttgcgcttgaattgacatattcttgtgcacaacgcctagcccaccttggagagccattgcaattgccattgcaccttcagttacagtatccatccctgcactgatcaatggaatatttaatttaatgttatccgccaaagtcgtactcaaatcaacttcgtttggcaaaacatgactttctgctggaattaataaaacatcatcaaacgttaaaccttttttagcgaattttgtatcccaatttgacatttaagctctccttttctcattcaaaaaattattagttttactttactagcctaacttgcttttttcaagcgaaaatcaaaaagcagaccgattttttccaatgtcattaagttaagacattgacaattaatattagacttttaaagcactgatttaacatttaattggttaaattggtgcttttttcgtacaacaaataaggcatagcacagattctgcttttttaagctacgcgatataaataatatacagctgatttgggcttaatatttctcttgtccttgcggcctggtctaattggaatggtataatagctgatctgaataaggatccgttcaaaatcttgcgttaaagaagaagccaaatacatgctctgaataatcaagcatgattgcttgaaattgatggcatattgatacttgcaatgcttttgcggaatataggcctgtgcatcaatttgactgattgcattaaacataatcatatgggcataaatttccatttcaataaatttatcttgtttggaatggaactgtacactgcctaaagaatacttcaatttcttgaaggaggtctcaataccccaacgcagatgataaagctctttaattctttttagcggataattttttcgatcaagattggttagcacaacttcccattcttctttgcctgatttggcatcattaattctaaatttgcaggctcgaaattttattgtgcataactcgccaaaatcccagcttagatcctgggtatttttagagcgatacttaatatattggcgataatgatgctggacatggtgaatattctcactggctttatgcgtgatgtagtaatagttagaagtagttaccaggcaggaaatctcacgatcacattcttgatcaggcaatgtcgttatttctttaactccgccttgtccagccttagttcgtattatgtaatgacagttaggcaggcgattgcagttttcaatcatattgaaactagtgtagccacgatccattgttacaatatatggaccacaattcaaagctttaagcatttgaacagccgctttgcgttcatccatttctgatttaggctgaaaaatacaatcctggtaggtattattcaatagatcatataaggcattaacgtgaatttgacaatagggtttctttttatgagaagaagcttgtacaatgttattcgatttcggattccagatttgattaaagtcagagccatcaatggcaaacaaacggtagtgatgatcaaaaagttgaatattaaatagattttgattaaaaacagtcagaatatgtttaaaacaagcaggagaaagctggcttttgcgttgaacataggcagaagtactaactactttatcgttctttttagttgcatcttcgccaaaagctctaaagagttcactgtttaaattctgaccttgcatgttaattgtagttttaaggactgtcgctgcatctaaagtgcgtttcctggtaaaagcatgaggattattaataaaatcgtgaatatgatccccagtattattgataatttgatcaagacgttctagaatattcttatgaagggctttcataattaacaccatctttctggcaataattttgaaggtttaaaatatataatatataagataggcgaaaaggctggtcttttcgcctttattttatacaaaaaaagagatcgaatccaaatgattcgatctctaaaaaagcacccttaattgtcaatgtcttaacttaatgacattggattttttcggtctgctttttaattacatagaggagttgtttattgttataagttctattatttagatatttaggattttagtctacttttcaacataagcatatttgaagttatagttagctccagcaccattatatacaacgcccttgacagttggacgaaccatccaagcttctgctggctggtaaagtggtactacaccttgctcagttaacaatacacgttcagccttagctaagtcttcaaaacgagtattttcgtttccagtagttttagaagctgctacatacttatcatattccttattagcccacttgccccagttgtatgaagcatttgaggtgttcaagtcaaggaatgagattggatcagtaaagtcagcttgccaacccatcagtaaagcatcaaagttaccattttgaccacgaactaaggcagtctttttaggtaaactatttactctgacattaacgcctttcaagtttgactcaatagtactttgcaagtattcacctgcttttttggcatcatcatcgtcataggttagcaaagtgaagttaactttgctctgtcctaaagccttttgtgctttcttccaataacttttagctaaagtagggttatatgtcattaacttatcagtttcagcagttttgactaattcagtataatctttgccatttacttcagtcatactatttggtgaaaaggtagtgactggcttgttagcaccacctacagctgaagctaatgccttacgattaaccgataacgataatgctcggcggaagtcagtattttggaaaagcttgttcttttcgtttaattgtaaatattgtgttgaagaagctggtctaattgtataaccactctggttcttcaattgttttgtagcttgtggtgccaataatgctacatctaattttccagattgatacaagttatagtcagttgatggtgtcttttgcacgctgtaattaatcttacttagttttaccttgcctttgtcccagtaatctttatttttaactagcttccaagacaagtttgaaccggtccagccttttgatacaaatggtccgttataaaccattgttttagatgaggtaccataatttttgccatacttttcaacggcatgttcattttgagggaagaaaaccccgaagcccatcaatagcttaaagtatggaattcttctatccaaagtaacggttaaatgttggttatcatctgctttaacaccgagtgtttcaaccttcttctttcctgctactacatcatccgcattctttactcctgagaaaagataagcatattgtgaggcagtctttggatcaacagtcctacgccatgaatagacgaaatctttagcagtaactggatcaccattagaccatttggcattctttctcaaagtaaaatgccacactttaccatcctttgatacctcagtcttagttgccaaagcattttccaccttggaatttttacctaaacgatagagtccttccatcgaattattaatttgatctaaactagttgcatcagtcaccttggacaaatctaaagttggtaattctgatttagtcatccaattcaaggtttgcttggtaccagatgacgaacttttatttgaacaggctgccaaagttgcagctgatacgacggttaataaacttgcactaaaatactttttccactttttcattttgaccctcattcttttttattacaaaaaggagcaaccttcacatggttgctccttctatctattcatcaaatcatagctagactattattacgcaattacaagtgaagagagattatttttatgtcttgtttgtaaaataataattgccccggatttaaaattgaagtgcaacactaagtgttaaacaaaaaggccatgaagacctaaacttgaagtgacgaaaaatcaagaaaggaagatcttcatgaccaattcaaattctagcatttctaagcactatcatcaattaaccagcgtacaacgtggacaaattcaagcaatgctggattccggcataacttcccgtactgttatcgctcaagaagttggctgccataagtcgacaatcagtcgcgaaatcaaacgcggaagcgtcctgcaaagagacagcagctatttattgtatgagcactattacgctgatactgcacagatttattatgagaagcgtcgcaaaaactgctatcagcgcaatccattgaagcattatgctgtctttttgagaatgctctccagacgctttaaagctaaatttgatgccaccagcatcgatgagttcgttggtgaattcaaaaggactatgccaggctacccttgtcccagcacaccaaccgtctatcgctatattgatcagggcttgctggacataagcaatattgatctgcctatgaagctcaaaagacgcaggaacaagcgtcatcacagccatggcggtcacgctttgcacaagaagcatcttggcaattccattgaacagcgtcctaaggaggttgaagacagaaaagctccgctgcactgggaaggagatctggttaaaggcgtcagacgcaagaatcagcctgctttaatgactttgactgaaagaaccacacgctttgaagtagttatcaagattcctgactatcgggcaagcacatgccaaaggctgcttcaaaaggagattgacagacatcctgcctggtttaaatcaatcacgtttgacaatggctctgagtttgcggatatgaccaagatcaagggctgccagatttactttgctcacccatattctccatgggaaaggggcaccaatgagaactgcaatggtcttttgcgtcaattcttccctaagagcaagagcatgaaagacaagtcaaaagcttatgttcaacaggcaactgatgccattaaccacaaatatcgccgaatcctccaatatcacacagcagaggaactcttcaagcaatatatctcttcataacctaactgttgcacttaatttgacaattcaggaaaataataattgctgaaataataatcattactatgtcctcctgattttttaattaatttgctacataagtattcttgaagttgtagtttaagccagcgccattgtagacaatgcccttaatgtctggacgaactaaccaagcttcagtcttgtagtaaagtggggcgattccttcatcgctaagcaagatcttttctgctttttcaaggtcatcccaacgcttagttgtatctgctgtagtcttagaatcagcgatcaacttgtcgtattgggagttactccacttaccgttattttgtgcattcttgctagtaaacaagtcaacgaatgaaattggatcggcaaagtcagctgaccaacctgaaacaacaacatcgaagttaccactagttgaacggttcaaacgagtcttgaatggtacgttagctactgaaaccttcatgcccttcaagttttcttctaattgactttgaagtgtttcagtcgtcttttgacctgaatcagtatcatcagacaggattgtaaatgaaacgttcttaacgcctaattccttcaaagccttcttgtaaagtttcttagcttcagttgggttatatgcggcgttcttcttatcaccaacaacttctgaccagtccttaccatcatggttaactacaccctttgaagttaaactggttgctggggtattagcgccacctaaagcacttcccagtgcctttctattgattgacattgagattgctctacgcaagtcggcatttttgaaaatcttcttcttttggttaaattgcaaatagaaggttgctgcagtatcacgcaaagtgtaacccttttgatgttttaagttcttagtttgttgtgaatctaaaatagtagcatcaagcttatttgattggtacaagttgtaagctgttgatggtgtcttttgcacgctgtaattaatagcatcaagcttaacattcttcttgtcccagtaattcttgtttttcacaagcttccaagaaaggttagaaccagtccagcccttttgtacaaaaggtccgttgaaggctgtagtcttagatgaagtaccatacttagagccattagcttcaaccaccttttggttttgtgggaagaacaatgggaatcccatcaataatttaaagtatggaattcgtttgtctaaggtaacaactaatttattatcgccttcagcttttactcccaaactattaactggtgccttacctgcagaaatctgagtggcattatgaattccttcgaagaggtaagcatattgtgaagccgtctttggattaacggttctgcgccatgagtaaacaaagtctttagccgttaacttatcaccattagaccacttagaatcacgcaaggtgaaagtccaggtcttaccatcttttgaaaccttggtatctgttgccaaagcattctcaactttagaattcttacctaaacggtataaaccttcttcaacgttacccaattggttaaaactggtaacgtctgttgccttagaaatgtccatcgttggaatttcagccgaatccatccaattaattgttttcttagctgatgaacttgacgaattagaattactaccacatgctgccagcgttgaaccggcaattaaaacggttgctcctgcagcaaataatttggtaaacttcatacacattgctcctctcatttatgagaaaaataatagaactctttaagttgtttataagtatagctaaattttttttgctttgcaagttttttttaatattatttttaatttatttaaaaataagcctcaatgctgatgtatcaaggcttattcaaaattaaattattctaaacattccattcttgcataaattcacgtacaaagtcgcgcatgtatgcagttcgtctctccgcttcttttttagcagcaggagtattcattaaatcttctaaatgaaaaagtttctcataaaagtggttgattgtggtttcgacatggttacgatattgatcatgactagttaaaacggctggcttaatctctggatcgtaaatcttattgccatgtttaccaccatacgtaaaggcacgggcaattccaatcgcacccaaactttctagacgatcagcatcttgcacatattgtccagataaaggcaaatgatagtgatgctcaatattagctgaaaatgacatgtgttgaatggtgaataaaatatcccatgcctctagttcattaaaccctacttgcggcaataactcttcaatttcatcaatcaccttttgtgggtcagcacatattttctcatcaatcgtgtcatgcaaataacccgctgttttaataatagcaactatccggctatcttcatgagcatcagcatgatctgctaaatacatttgactagccaaattagctacacgttcgccatgataaaaatcatgacccgttttttcattctttaagtgtgtttgagtaaaatcgataacttgtttaatttccattatgccattgagtcccatgcttttaccggcgttgctttgccttcccaaatcttaaccagtttttccggtacatattgttttttaacaactactttgaagagatattcatcaaaccagttatcatccatcacaaagtagcctttttcaccgaccttgtttccccatgagttttcaattttccattgacgtggctttccattaacaacatccacaccaaccatcgtcatggcatgagttgaacccgaagcaccagtttccagtctctcttttttgcttaacttagtttcaatattaaaaatagcatcagtttgatagaggttatgagctaaaattcccttttgacgatcgctatctttacctacatcacaaccaaaccaaaaagtttcgcctgcttcaagttgcttaatcgcagcttctttaagattttcaattttagtgtttaagaaatgaactggacttccgccctctacattgtcttcaaatggcaaagcatacagcttatcaaattcatgatctggtgcattgaacaaaacaatatagtcatccaagtcatcagtaaagtagtcgtgaaagaaatcaagtggagtaagatcaccatcaaaatgatacttaccttcatcatccttaaactcaaggtcaaatttttgtactggttgaccgaaagcaattactgccatacggtaaacctcactcaaaaattcttgacgtttagcttcaatttcatcatttttacctgcttgagctaacttacgcaacacaagtccatcttctcgcaacttattattcaaaatacgattgaagaaagcagtattgttggcagtgaaactttcatcttgagcataggttggcactaagccgtacttcctaatcaaagaaacagccatagcccattggccaccatcagtatcaggtccctgcatataagtatgcactgttctgtcactaagtggacgatctgcggtattcaaaatattatcaaagaaaatatttgctcgttcaattcgatcccagaagaataaataattttgtgaaaaagtaaagtttttagcattatacttcttagcaaaaccatgacgcaatgtattcaaggccgcaaatagccagcagcgacccgattgcttttgatcagtaacattatcagttgggatttcaattgaaaaagtgcggttcaatttcctaaccttttctgaatccaaactagccttagccacaccattattaacaacagccaattccgcaacccgattttgtggtttttgctcatattctttttgaaatttagcaatttcattcattgtaagttcatgcttcataaaatttttcctttcttgccaaaaacaacaactaagccgcttcccaggtttgaactggggacctcctccttaccacggcggtgctctacctattgagctaaagcggcgtcttcattataccaaaaaaggcgaagacattcatttgaacatcctcgtccttatttattctctccaagtatttttagaaaataagtattcaaaacggttattaaatttgcttttatttagttcttaacgacgtctttagtattcaaccattgactcttgttgattctaacaatcttctttttattaaccttcttaacgtcttttgcggtataagtagaacccattgcaacttttttgctagttttttcagcatttttattgtaaacagctactttttgatttttggtgtctttaataacaacaaagatcttatcaccctttttaatagcaggattggttggagcttgtgttgcagtacccaatttaggagcagtaaatgaagtagcttgagcaataggagtaagaacacagcctaaactcaaaccgattaccaaacttgaaataatcttaatagctttcttagattctaacattttaataacctctttctatttacttactttctctttacactattactataacactgtttgattagaagtaaagcagatagtgctgcttttcacatatttttattaagagtcagtttttaatagagtgctttgcatcagcatttgcaaaaggtatacgcagctattttatattggtattacacttgaaataacaaattgtatagtaataatgtgaatttgtgaataacttaataaatagattgtagcaattgattttagaaaataaaataacaatttaagaagtaaaatattattttacacaaatcattatctttatcttttacaaatattagttggtagtaaatatctccgattattagctaaaaaaatagaggaaaaaatccctctatttttatatataaaatgttaaaaccatatatttaattatttaattgtaactaaagtatactttctctttcctttacgaataataacgtacttaccatcaaagtcacttgatggatcaacttcgaaatcagtactttgctcacgatcgccattaacataaatggcaccattctttacatcttcacgagcttgacgtttagaaggttcaatcttagtgtcaactaagaaatcaacaatattcttcttttcattgccagcttccgcacttggagcattcttcaagccttgttcaatttgagcaactgataagttcttgatattgcccgagaacaaggcatcagtaatcattttagcttcttcaagacctgcttcgccatgaacaaacttggtaacttcttcagccagcttcttttgtgcagcacgtttccaaggttctttctcagtcttttcagctaaatcttcgatttcttcacggctaaggaaagtgaagtacttcaagtatttaaccacatcacggtcatcttgattaatccagaattggtaaaattcataaggactagtcttttctggatcaagccaaacagcaccaccagcagatttaccaaacttagtaccatcagccttaagcatcaatggaatagttaaaccaaaggctggacgatctgcgccttcaagcttatggattaaatcaataccagcagtaatgttaccccattgatcactaccaccaatttgaagttgaacaccatcatctttattcaagtggtagaaatcaattgcttgcaaaatttgataagtaaattcagtaaatgaaataccattttcaagacggctagctacaacatccttgttaatcatattgttaacttggaataacttgccataatcacgcaagaagtcgatcaagttaagcttgcttagccattcagcattgtttctaatttcaaaattttcagtaccaaataacttcttcatttgattagttaagctttcttcattgtgcttaacttgttccgcagtttgtaaagtacgttcagtcttacggcctgatgggtcaccaatcgcaccagtaacaccaccaattaaaattactggatggtagcccgccatttggaatctcttcaagatcatgaatggaataaggtgtccaatatgaagggaatcaccagttgggtcagtaccacagtacaatgcccaatcgtcatgttctgctaagtactttctcaaaccttcctcatcagtttcttgattaatggcaccacgccattttaaatcttccaaaatatcaaattttgccatagtttttcctccaataaaaaacgtcccctggtcaaaagaccaagggacgactaaattacattattagccgtggtaccacccacgtttgcgctgctgcgccttattcaagccggtaaaggagcaaccctattaagtacttcgctaaaatcgacctgtctagctcacaccaaccgctagttctctgaacgctgagccgactcgctactcatttgttagttatgatattaacgagaaaaatagttttagtcaaccgctattttacaaaaattgttttaattgcggaccatggaccagttttttcaccattcaatgcttgcaatttcacttcataatttctatttctagtaataccagtaatcgcgttagtagcctgatcagttacttcatagtaccacttatttgtacctttttggcggtaggcaatgcgataactttgtgcactagcaattttattccaagccacatgaatgttgtgataagtactgtcagctttagcagtggttaaatcaactgcacctggtgttgcatctgaaggtgcatagtaagtgtgttctactgaattactccaagcaccaaaataattatctttttccggattgccgtaacgaatgtaatcaggattgcttacaccgcgagctacaaaatagtagctttgaccattaactaattttttaccaattgaaactgggattttacgatcatttttgtctatgtaacgtgtagcaggtgcagtacttacttctgtagtattgctactagaagtgaatggagctgcctttgagcctttttcacgccatgcaagttcataagtcttcgcatgacgtgcatcccttaagttagcaaccataccatccttagtgttttgtaaagattctatctcagtatctgccggtaccacacgcgtatcaggaacagccgttaattgaaaattataaagtccacgagtatttacactaaaagtataatttcctttagacaagtaccagctttgactagcaatcttattgccattaatttcgaaactctctgggtaaagcatcgtactaccgccaactggattattttcactgaacatgattacattcatcttgctgaaaatgttaccttttccaagctgataaatcggattattgatcatcctcatcgtaaccatttgaggtgagtcaatagtaaatgtgtagtagtcgacactatcgtaatcgtacatttcacccattgctttaatatcttgaccaatttcaatctttctagctttaagactactgttgtcattattcttctttgtttcaacgtaagtttctaaattcttacggatcttagttaaacgagtataagtagtcttcacactaatattctttgaactagttaaataatatgtgcctttacgcagataatacgtatttttgtccttaccataaggaatacaggtccattccatactattttttaaagtaacattgccattagtaactaatctaccagctgcgggtaaatggagtttataaatctttcccttagctacatagttacgcctattaatattaaaactggtaatgttcttaggattatatgtcccagcttgaacagttgttgcagaagatccaaatagtgcagcactggctagtgccattgttattatctttttcattctaatcacctttaaatcagctaattatcagttattcctcttagcccttattttatcattggatacaaaacattctaagctaaatagtgaattagttatccgacgggataattgattcactatttttattcttttgtagaattaaagtagtagtaaaacgatatgccctgaggtctttagacacttgatgtcgtatacaaaactggcagttttacttaagttttcaatagtctcttcgaagaatgtggacactagatgtcgagtttagaaaattagatctgatttcttaagtaaatacgttttactactaagttttggaggtttttattatgcaagttacttttggaattgatgtaagcaagtctacttctactgtttgtgaactaattggtgaaagcaaaaatgaactaaccattactaataatcgtcctggttttattcaattgcttcatgaattaaccgctttttctaaacatccgcaaattatttttgaagctaccggtgtttattcacgtacactgcaatcttttctggaagactatggctatgattatgtaattcttaatcctcttaaagctaaaaaagaaatggatatgggactacgtcataataagactgataaaactgatgcttatcatttagccttaattcaaagactatatcatcatccaattaatcaacttcaatctcaaacttataagcagcttaatgctttgagccgcttctatgaccagttaacagctgacttagtaatggctaaaaatcgacttcaccaagctctacaatcgacttttcctgaaattgaaaatctattttcttctgctaaaggtaaaaattactggcaaatagttgtgcgatatcctcattgtgacttagtaagaagagaagataaaaaacagcttattaactggttaatgagcttaaaggggattgcttttaaacacgctctaaggactgcagataaattaattgaattagcttatcaagcttatccagttgtatcttgctctagcatagaagtcgagcaagtgcagtattatgcacacagattgcttaatttaagtgatcaaagagaaaatttaatcgcaagaatggttaagttagcgaagtctttgcctaatcatgatttagaaaacctagaaagcattccaggctttgcacagaccactgctgtcagagttttagcagagttaggagatttacgcagatttagtaatcctaataaaatcaatgcttttatcggaattgatccaggcagatatcagtcaggagaaatggactctaatttaagtattactaaacatggcaatgcagtcgcacgtaagttgctttatcgagctattggacaaattgataatgcagctaagacaaatccgtgtcatatagcagattattatgaaagcaaaaagctatcctctcaaaccaaagggttcaaaaagatagctattgcttcaattcataaactaatcagaaccatttatgctctgattatcaatgatcaactatatgattacaacgtagccacacataaccaaaaagactttagttgtaattaattgatcaagtacattataacgctaagcccataaattaaatatagaggtgggcttatttagtatgctttctaaaaaaataaatcgccactaaaagatactcatgacaaaatttaggtaaaaaataaagccaaacaccttattgcgcttgactttacgtagaaaaaagaccgaactttacgttcgatctcttttatttagtcaccgatcttgtaaaagcccttagcttttaagccataagcttgaccagcagtcatatcatattgcaccatttcgtaatccttcaaaattgcttgttgttctgaagtcaatttctttggatcaacgaagtgccccttttggtcaactaattggaagccttgatcaccattgaagttaatcgtgattgctggcaacttcttgtgaacttctgttaacaatgcttggtaaggagttaccttagaattagtttgttcaagcatcattgcagtaaagtcactagtgttgacgtaattagagttgtgagtcaacttgctcttagcaccatgttctctagcatacttgttagaataaatgaagtagcgagttgagtgcatttgcactggataacgactagcgtagttttgtgacaagatacttgggtagtggtccccatagaagacaactgtgattggcttcttgatcttatcaatcttaccgataaattgctttacagccttatcagtgtattgaacacccttcatgtaagttgccatttgttcacgaatagcagcagtgttgaagagttcaccagataccttgcccatgtattcattgtttggataccaattgttgtaaggcatgtggttctgaattgaaatcaaattaatgaattgaccacccttcatgctattgatttgtttcaaaccatttgcataagtagtgtaatcagaattataagttgatttaccaagtttcttttgatcaatgatcttatatttagagccaaggtaaacaaacttattaaacttaaatctcttatagtcttctactcttgagtagtaagtaccaatgaatgggtgaactgcagacttataattgaagtccattccgaccgttggatagaaatcatggtttggcacaatttgaacatatggcgtcaaggttgacttgaacattcccatgttgaaaccggtcaaagtttcccattccatgttggcagtaccaccaccataacctgcactaagcatgctaccgtaagtagatctcttagccattgattgaataaatttaactggatttggcaccttaggatcgatctttacagttgggaaagtatatggatcaacaaaactttcactcaagttgtaaacaatagtttgattctttagagtattctttcttgttttgttaatttcattagcgatcttgctgtacttctcattcaaatgttgaattgtagattttgaatagttagttggcttattcataatctgcaggtcaaagtaattcaagaagttcaataatggaccgttaatttgaatatcacgttcagggtttctaaacgattgcttattatcaaagccacggttaatgtgataaataattccgccatcgtggttaaagcgcactggtgtcatgaacaaaagcaaactcaacaatgcccaaataccacggcgtttccatgagccctttttcttaattggaaacttaattgcaagaaagacagtcaatgcaatgataattactaaggcaatagcgatcataattatcttttgttggccgaccattggcatcaaggtcttccagttaacaatttcgtctaattcagttggataaattggttccccacgaagatctaatttaatcttgttggcaatagcccaaccaattgtaattacagttactaaaactgttgaagtccagtaacgcgtagtaatgaagtagaaaattgcaaacattgcatcaaggaagattgctgtcaaaataatagcgaagaatctagtcccgagcaagaaaattacggcattgatatcagttgcagtcgtaatttggatccgcagattatctgattcaattaagaatgaagcaaaacttaatacatagaaccagccccatgtaagtagtcgtactcgattttcaactatccaagcagtgaagttagtccaagcatcttcaacaatttctgctaagttattatgttgcttgaaaaaagcaaccgtccgtttaaccggcttcaccttgaataaatagcgctcatatagccagcttaagccccaggcagctagcatcatgatgacaatcatcaagaacttgttaaatccagcgctattggtaaagcggaacgatttaacaaaaccaccaataattggagcgtccataaaaataattactggaataaagaagtgcatctgcttagcactatagctaacaatcacttttctaaagattaagaaggctgctaaaaccattaagaacaaaaatggtgaagcaatattacttaaaaatttaggattccaggaataaacgccacttcgaccagataatcgttggtaccagtaaaccccattaaatccgggaataccgataaacattacgaagaaagacattactccagctgcaattgaccagccaaagacctttttaggaattttaacgttagctaaaaacatcccccaagcaaagtacaagatcaaataaatgccataaattgacttgttaaagatcattgtacctgcactagtcgcaaaaccagtcaaagttaatgcgctaagcaataatacattttgcttagtagtaatgcgatgttgtaattcatacaagtatggttgaactagcatactaaaaatcaagccagccaacaatactgatgtactagtcaaaactgggaaaaatactccccagagcttccacatattaaaggtacctggtcgtttaaagaagttcaccaagtataaaagcactagtgtaacaaccgctataatccaaaacttaaaggcttcagttggatgaacctttcttttgctataaacagcaccaaagaccattggtactagtaccatcgtactgtgaccaagtagtcctggaataaatctcattagggtacttaatggtaatctaccaaaagtgctaccccaagaatacatctgcactagcataaagaatgctgcgacaatcaaacaaatgatttgaagagcatttagtgattttttcttgttaatctcactcattttctctagtctgtgtcctcactaaaaatttctgtcattacttaatgatccctagcttctttttaattgaaagcagaatatcaacctttttgccatgaccggtgaaaaagtctacgatatcatgccagaacttaaagcacatgatcaaagtaatcacgataaaaacaaatcctgcttcttgattatgcaagaatgtatttatactgaataaaagcataaacactaaaggcggaatcgtcaaattttgcataattgctgttaataccaaagccactaataaagtagcaaagccagctttccaattataaaaaactgctgcctgagctgcaaccgcaactcctttgccacctcgaaaatgatcccagattggaaaacaatgtcctaagatcaggcctagccctgtataagcaatattaatatgagctggaaaagcaaaatatacaataaacaaggcaattaaacttttaagcaaatcgcctaaacaggttaaaataccccattttttaccaaaaacagcacccatgttagccgttcctggattatgtgaaccgtattcagtaggatttatttttaaaaagattttgccaacgatcatcgccgttaagaaatttccaaaaacgtagccaatcagagtagcccaaatgcgcgccattaattatcaccttcttcggtgtaatcatagatatgatagtgctgcgttttttcgctcttaaagctaaagccatttgcaatattcttttcgttttggaaagtttcattatttgaaatcatttccttaggtaaacctaattctttgcgcaccaggttagaaatccgttgcaattcactagttggctgtacttgataagccgcatcgtcgatcattgcattgtaaccatgtagataatcactagatgacgaattggcacaactacgataattcatcgcaatctgttgcatcgcactaaatggcaagttagtccgaacattgcttgacacagaagtcaaaattgaatccagatttgataatgaactaattgaaactgccttcttgatcaaagtggtaattacctgtcgttgtcgttcttgacgaccataatctccacgtggatcatcataacgcattctagaatatgctagcgcacctgcaccacccatatgggtcagcttgccctttttaaaaatataaccgccatattcaaagctaagcgttggtctaatattaattccgccaacatagcgaatcatcttcatgattccacccatgttaaccacggcataatacttgattggcacattgattaacttagaaactgaatccattgacatcctagccccgcctaattcataagcggcgttaatcttttctgtcttgaagctctcgcttccaaccatctgtgccatcgtatcacgcggtattgagaccaatgtgtaacgcttcttagcagggttaactacagctaaaatcatggtatcagtccggccgcgcttttcagttcgatcaagggcacctgtatcagtccccatcagtaaaacagcgaacttcttctttccatcaaattcacctgtagttttcactgcagtcttaggatcataggtcttatcaaccgctgacttagtacggaaataaactgaggcaaagtacgccgctccagcaaccgcaagcaaggctacgatactaataacccagacccaaatatgacgatttttataactgtgtgtgtctacccgactattatgcgggtgattagatctttggtttctatctttcataaaatatacctattatgatgtaaattcacattgaatgtattataacaaaaaaagcaaatcatcgctgacttgcttagtatatcttattaaaatcgttactaatttttacttcaaagtcaagcttaacgcaaaattacggctactttttgcctctaattcaattttatccgtaaaagctgtaacgcttccttcttttgcactcaacttaaaatcagttgaagtaagatcaatgccatgttctttgccagtcaaactaatcttattgacccggctttcactttgccaagaagttggtaagataaagcccaaagaaaatggcagttccttatttgaagaatttttcaaataaaaggatatgttgacttgattaccctccaaagcataagtagtcattacttcaaaatgatatggaaaactcttatagctctccggcgtatcaattaaagttagacttacgcgagtatcacctttgtcaacaacggtccaaggcaacttgttagccaaattatcggcttgatccattactggaaaagcaagtgccataccttcttcactttcttgctcgccgagataatcaaattgatctgttaaagacaccagatgtgccatccgggccccattctcatcgacagagacttgaaagagagaattatcgattgtttgcatatttttctcccaatttctacactcctgtaactcaaaatagcacttatcatatacaactgtcaattttcaccactttcttagaaaaaaatggcgatctttctttatttataatataatgaagttgttccaaaaaaattatgaaatcaaagaaataattatagtttttggagcaagttgatacaaagaaggcatcccttaacggtgatgccttttttggtgtataaaaaaactccgacttacgccgaagttctatttgtgtgaataactacttaataaattagtcgtccaacttttccttgttaacaacatccaagttttcgtcgaatgtgtaaacaactggttcaccggtcttcatttccaagttcataatgtcttcatcagaaatgttttcgatgtacttagtcaaagcacgaagtgagttaccgtgagctgcgataattacgttcttgccgtcaagtaaatctggagcaatgtggtcttcccagaatggcattacacgatcaagacatacgtgtaagttttcagccttaggaacgatgtgtgggtccaagtttgcgtaacgacggtcatgtgcttgactgaattcgttgtcatcatcaatagctggtggcaaaacatcgtatgaacgacgccaaatgtgaacttgttcatcgccgtacttttcagcagtagccttcttgttcaaaccttgtaaagcaccgtagtgacgttcgttaagtctccaggtcttagtttctggaatccaaagttggccactttcttcaagtgcaaagtgcaaagtcttgatagcacgagttaataatgaagtgtaagcttggtcaaattcaagaccgtgttccttgattaaacggccagccttcttagcttcttcaacacctttttctgaaaggttaacgtcaacccaaccagtaaattggtttgaaaggttccattcactttgaccgtgacggattaaaactaattttgacatgaaatatctccttttaaaattcaatgtttcatccatattttacacatttcacaaattttttcatagagttaagactaaaaaaatcgtgttttttcaattttgtaacgttattcttgctatactagaagaaaaaatttaatgaaagaaagttatgtatgaaatttaaacatcaaaatattatcattaccgttttattagcattactctttttaacggcctgctctaagacaggttcaaaaaagacagctaatttacctactgccaagacgattttaaccagtgcagaaaaaacgaaattcagttcaatgcacgctacttggaatgaattaagcaatggcaagtctttgcaaaaagccgaagcccaatatactaaaaagccaacgattatttatgctaatgtttctagcagctctaatcactataaaatgtggattgagggtaaaagcaactatatccaaatgaaaggtaccaattctcagcgttggtttaagacaaagttgtctaaggctagtgcctatggtgccattaccgacaatttgaacggcacattactcatgcctttcatccctaacgcaaaatattttaaggtaaagcaaaacggcaatgattatctgcttacttataaaggaaataacaaaaaaatttggaacgcaattgtatctgattctgcctttactgctttaatcggcatcgatcttgatgatgttaaaccaattagcaacgaaatcaaaattaacgtagatcagaattacgacatcaaaaatgttaatgtgacttctacttataaggatgaaggacacaaaaagaatttcaccatgcagattgatcaaattaatcaagtcaaaaagttgacggtacctgcttctatcaagaaatcggccgtagatttaggcaaaattaatacaaaataaagtaaaagaatagtccgtaactccaacgagcaacggactttttagttataatagacttattgaagcatagaggagaaaaaaatgaaacttaagaaaacgattatcggtttatcctttgctgtcctctttttattaggtggctgcagtaaacaagagaagaaggctacttcagctctgactaagactcaagttgtacaaaaagctaaaagtagcttcaagtcgggacaggttattcaatctgttactctgggtaccgacacttctaatcaagttgccttagctaacactacctttggtggtaaaaccactgtttaccacatcaccaatcaaaccactagcaaaggtaaaactagttctactgaggaatgggtcaaccttaacaatgtctacattaatggacaagatacttggtacaaggctgaccttgaaaaactaaccggtcataattatgccgacttaaccgatgccatcatgaataaccacatgatcaccaatccaagtgataagttggtttctgcttataaaatgaaaaaaagcaaaaaagatggtgtttacacttatactttaactgctaaaagtactgaccaagctttgatgaaaaaggcagcagcaccaatttttgacactactgctcaaagtacaaatcaagctaaaattttcagccaaattaaaaaattaggcaagtaccaatcaatgaatgttaaggctgtaattaaaggtaataaattatctacctttaatgtctttgttaatatgaaactaggtaaattaatgtacgttaaagttggtcaaagttatggcaacttcggcagccatgacttcttaagagtaccagactctgcaactaacgctaaagatttaccaaccactaatactaaaaagaagtaggcaaaaaaatgaaattaggaattattggcagcggcatgatcgtccatgactttttaacaaccgctgatcaagttgcgaatatgactgtaacggctatttcctcaactaagcgcagtgaaaatattgcccgggaattagctaaaaagtacaacatcaaacgtacttatacggacaatgaagaattaatggctgattctgaagtcgatacagtttatgtagcggtgccaaacttcttgcattatgagattgctaaagctgctctagaacacgataaaaatgtaatctgtgaaaagccatttgttcagagcaccactcaagcaaaagaattaaaaaagttagccgacgaaaagggtttgatcatcgttgaagcaattactaacctttatttagaaaacttcaaacaaatccaaaaagaattgaacaagatcgcaccaattcatattgttaacctaaattatacgcaatattctagccgctatgacgcctttcttgaaggcaaaattgcgccggtttttgatcctaaaaaagatggcggtgctttaatggatttaaatatctacaacattcatcttgtctcggcattgtttggcttgcctgatcaagtgcaatattatgccaacatgcaaaaaggcgttgatacttctggtattcttcacctctcttatcctgacaaacaagcctccctcacggcatcaaaagatagctatgtaacgccacgttcttttatcgaaggtgaaaaaggtagtatctattttgacggctcaacgggaacacttgataatttcacagttgaaatgagaaatgagcaacctaagcgttataatttaaataaatatccgcaccgaatggcagctgaatttaatacttttgcccagatgattgatcaacacgatacgcaaaaagcggatgaagcatttgtcaatactttagagacaatgcaaattttgactaaagcaaaaaattctatgatttaaatttggaggaaaagccattgaaaattttagtaactggttttgatccttttggtggcgacaagatcaaccccgccattgaagcagtcaaaaaactacctgactcaatcaagggtgcaaaaattatcaaattagaaattcctacggttttcaataaatctgcccaagttgttcatgatgccatcgtgcaagaaaaaccagattatgtacttaatgttggtcaagctggtgggcgtgctgctttaaccccagaacgagtagctattaatattaacgatggtcgcatccccgacaacgatggttatcaaccgctcggtgaacctatccaagccgatggcgacacggcttacttcacccaactaccaatcaaggcaatggctaaggcgattcgcgctgttggtctacctgctacagtttccaacactgccggtacttacgtctgcaaccacatcttttatcaagtgcaatacatgcgagctaaagaattccctagccttaaagctggcttcattcacatcccatttttgccagaacaagttgtcaaaagaccaagcactccatcaatggcattagccgatattgttaaaggcttaatcgctgcaattggggctattgttgagcgcgatggacaaggcgacattgaagcagttgaaggacaaaatcattaattacgtaaaaaagaggttaaatgcaggatttttgcatttagcctctttttatctctaattttgatgactaagtaacttctttactcgatcagcaaccttaaattctccagaaaagatcaagatatcattcggctcaataacagtccaaccgtgtggtattaaccactcatcaccacgccgaattcgactaaccgtaatcttgtccacaaattccagatccctaagtggtcgtccagtataggaagtacttctcaccttaactgagtacaacacattgttagtatcagtcataatcttgtagaccgttggagactcaatcaaagctcgcatcagagcagaacgtacattagtaaagttgaacaactctactcctgcctcctggcatcgagccatcgtattgctatcgacttcattcattcgggcaattgctcgtttgactcccaagtctttggcatattccgccattcgtgcattttcttgatcatgatgccctgcagctacgaaaatgtcgcaatcaaaggcaccactacgctctaagctttgattatccaaattatcaagtaatgttaaacctttaaccctactatcataagtttcgtattggtcctgctgatcggtaaacatcttgatcgtataccaattatcatgcaaatcatgtgcaactggtaccgtaaaagtattggcacccacaatagtaacagtttctttcatccgatcctcaggtgataaaacaaagtttgaattaaagacaatcggactcacgatacaaacaataaccgcagctaagataaaggcatctgattgtgttgaagtaattgcatgcaattttctagcaacttgtagagttggcaaaacaatcgtaattgtagtagcagttaaaaagccaccagcaaaggcatttttcttttcaaaatagcgcatataaagaaaaactacaggagctttagctaagaacaagaaaatgaccaaaactggcaacaacatcaatgatgatggatgagcaaatagtgactttagattcaagcccacgccagtcataatgaaaaagattgggataaagaatccataaccgattgaagttagcttatctttagttgcctcgcttggttccaataatttcattaccatcccggccaagaatgctcccaaaatattttcagcaccaactcgctcagctacagtaactaaagcaaaaatcaagaagaaggctaaccgaatatccaattgagtcgttgccttagttactttgctaaaccataaatacggttgcttaaaccgccgcaaaagaataatcgcagcgataaacagtaagataatcaaccaaagctggccagcattccctccattaactgaggcataaatcgttaataagagcaacggtattacttcgcccaaaaccgcagttaacaaaattgtctgaccaatcggtcggccaagaatatccttttccttcaaggtagcaataactacacccaatgcaatggtcataaaaataatcgctgccaagataacattgctaaatagccctatcagctttaaaacatatgccaaaacaaaggccattaccacaattccagcgaaagctgttaaagctgttggcaacggatcgacagtttttcccgcctgtgatttagccttaggattattcttgcgctgtagcaggtcaaaattaatttccattcctgataaaaacatcagcaaaattacgccgaggttcgataaaaatgttaaatcatgtatcgaaaccacgatattaaatccgctcgaacctacaataattccgacgataatttcagcaatcgccgttggtacagtgcttattttgaaacgcgccataaatattggaattacgagcgctaataagacgaccaaaaataatgataattgcgccattaaattctcctcttttcacattcaacacaagaattatacaaaaaatacgtcttaattcccattatttatggtttaagacgtatttttctaattaatatcgctaactaaaacatattgtgtagcatttaaagcataatacttttgacctttaattgtaatcttgctgccatatgtcatgacccgactacccttcttgaccaaattacctttttcaattcgacctgaacgagtccgcaaatatgtattcttcttaacagttctagcagtagcatcaatattagtagctactacgtattcgttctttccaatttgatagtacttcttattactgattatcttgtagcctaaaacggttaccggactaccagctaacttcaagatcttggtcttcttgccgttcttgtcataaacataagcatcgtgacctaaagttaccgcaccttgaacttctgctggtacttcgtccttaatcttatttggatccttagtatcagtattttcattcttcttttgcaagtcatagtaatactcgatcaaagaataaaactgatccatgtcgtaatcccacttggcaaaataactatcagggtcaacgtggtctgttccacctaagaaggtgctaaccgccttgtgtgaccaaattgtgccttcaccatcatcgcaagcattgtctggctttaaattgtaacgatgaagcaacttggcaatataaattgcatcattattaactgacttagcaaaggcatcacgactatcttcttcacaaagctcaatttgaataaagcgattgttggcattcagtcctgcgccccaagtaccattattaggtgaatacatttggatgacttgcttactatctacaaaagcattgacgtaagcgttgatatttttccactcgcggttaaagtagattgcttcatcgtgagcagtagctccgggatcgtcagtctcatgaacgacaattccttctggcttgccattttgatactcaacaccagggaatttattgtacttaatcccctctagtttgagcatcttgtataaataggtgacaccactatattgatatttcttcgctaaagtattaatcgaagcggctttgacctggttactgaccgatgatacgccgactaaccccaaaagcgcaattaaggcaattaaaaatttgcgtatcttcacaacaaagccctttccttaattacatgaagttcgatttcttaacgtattgacgaatacctaccttatagtatttcttaccattgatagttatagcactgccgtaagtagcaatttggctattcttcttgtgcttcaaattgttatcgcgattgccatattgattgtaaacataagcattcttcttcaagaatctgaggctaccatcaatattaccagctgcaatgtattcattttcaccgacacggtagtaggtcttacccttgatggtcttggtaccataagtattgatccacttaccaccgttttcatcactggtcttgtacatcttgccctttagcttcttaccattttggtcataaacataggcattatgtatcaagttcttagaaacagctggcacattcttaggtgcctgagttactggttccttagttgcagaactgctcttgtccaaaactgagccattaacccaaccgcgaccatcaatatacattctgcttgaaccatcatggaaagtaatagtcttggtaactactactttttcaccagctttaacagagccaatagcactggcaacagatggagcagttggccaattataagttgaactatccttgccagcagtataagttctagtagtattaacggttactggatcatacttagtcaaattagaactagtaatatgactatttaatgccttatcatacttagagtctgtagcatacgtaccggtcaaagccttggttgcagctgcataagttgatgcattttcaatccaagtgcccttataacgcaacggatcccaagaaacaccatttctcaacttactcccattatcttcaaatgattgttcaaaagatgggtattttctaaacttagcagtaatatagtagctcttaccgtttttatcttcttctctagtcttggcagtataagtctcacctgtccaagaatcatcagccttcatcccaaaaaggttattagcattcacggctaatcctgactttccccagcctgactcagttattgcctgggcaatcatcactgatggcaaagttccatattttttagctgctttaactgcctgcttggcagccttgtttaaaaatgcagtttgatcagcggtagcggcagaaactcgttggcttgaggcttgattcatcatcgtagtatttactgctggcacagctacagaagtaagcattgcggcagcagcaaaactggtcaaaagtctcttcttcataaaaaattatcctccttaatataacacctccattgtatctatcaaattaggtctagacaagcgtttcaacagatttgtcgtaaaaaagtaacatttgtaataatattatttaacttatataaattttttaataagttaacttcagcatagatgaaggtagtggattacctatactaagttcatttctaaacatatcaaacagctcttcgggagaagattcatctaaattatgtcctgagtgaactagtatccaatatacctttgtagatttgaaaactttagttgccttttatcttccaaaattagtattctgtgtaattaactcgattgtgttatcagtcataaagtcaataaaactttgttgttcttcgtctattggtttagcttttaactcagaattaaacattctgtacaaaataatagggtgcgcattttcgatattacgcttcgctagccataagaacgcatatgtatctgacttttgaaaatcttgttccgcttctttacgcgatttccccatattttctacgatcaagtccactgttttatcagttaattcttgaattttagttttatcctttttatttaacatagttatcacctacatatcttaattttgacaatatataagtacgcaaaaaatgtcgatttctttttcacaaaattacttctttagattttctttaccttattattttacaagcatcccttaacaaaaccaaaaatgacactctaaatcatcaaatcgcatcgtactcttttttcataaaagtatctgcgcagcggacaaaacccacccaaccgaccccaagcaaataagaggacagaaaccaccctttcattgcttgaaaaaaatcgagtacacaatatacgtgcttcaggcgtgtcgcctgtacgcatgctgatccttcagcaatgactactacctcatgagagttataaactcatggatcttgctttgaagaattttgtacattataggctccctacatgctgaacctatggcctattacattttttatatttcaaggaggaaaagaccacatgaagaaaaatttaagaattgttagcgctgctgctgctgctttattagctgttgctccagttgctgcttcagctgtttctgttaacgctgctgcaaccactaccaacacagttgcacctgcttcttctcaagaagttactgaccttggtacattaagaggcaccattgttcttgaccgtgcttcaaatactcaattcagtatcaaattgagcgatgctcaaaaggatgctatcttacaattaggtggcgatgcattaaaggatgctaagccagaagatatgaagaatattactgttaagtcagcatctgcttcaaactcaaatggtgaattccaacaagttgttacattcactgttaatgacaaagcttaccaagttactttaaatgctaagttcgctagccaacaaggtactccttacttctacaacaaggatactaacactgttgtaaacgatggtagcactgtttcattaaacgaaattgctaacggctttagttcatcagatcttttgaatgctattcaaaagcactatgcttggaagaccagtgatcaatcaaatgacactattaatatgactactaccgcttcagatgtagaaagtcaattagtagctcaaggcttgaagcgtgcttcaaacggtaactttgattatccagcaaacggtttcaaccttaagttgactgctaagtcagaaaatggtaattcaactacaattactgtaagaattaatgcatcagtaaactacaatgcacctgcatttgtatttgacggcaacgtttactacaatgacaacgttatgtcaaatggtaaaacttcaggtaacttagtacttaaggacactgacaagaccaaagttattgtaaatggtaaatttaacaacgatgctgtaactggtgctgttaaagcttacgtacaaagtgcctatggtactggcttcgacaagactccagcagaattagctgctcaccaacaattgatcaactcaagcaatattaagattgactcaagcaaggttaacccaagtgttgcaggtttgtacccagtaactattactgctactaatccagctggctttacttcaaagcttactgtttacgcaattgtaatgggtcctactgaaaaggcaccacaagaatacgtaaaggctgataatactaaagtttacaacattaacggtaatgttgtttcagaagctgctaatattccagctcttgcaaagggcgcagctgtttacacattcggtaaggtaactgttaacggtgttgaatacactcgtatcaacaaggaaggctcaaacgaattcgttaagagttcagacttaactgctactaagccagatactactgttgctagccaaagcaagactattatgcacaacgccttctactacaacaaggacggcaagcatgttgatactgacaagaagttgactcgttacaactcagtaactgtttcacctaagaccactaccatcaacggcaaggcttactacgaagtagttgaaaacggcaagctttcaggcaagttcatcaacgcagacaacattgatggtactgaacgtactttgaagcacaacgcatacgtttacaagacttcaaagaagcgtgctaataaggttgttcttaagaagggtgacaaggttgttacctacggtggctcttacaagttcaagaacggtaagcgatactacaagatcggtaacaacactgaaaagacttacgtaaaggcttcaaacttttaattaagtctgtggtatacgctgacaaataagaaaggcagagcgaaagctctgtctttttttggaggaaataataatgaaaaagaattttaaatttactagtattgtagcggcggctttgttcgctgcatcgcctgtagtttcattggtagctgccccaaatactattcaagcagctgcagttgtaactaaaagtagtgttgtcactcactatcttcgtgatagaagtgtatacacaaacagcactagaattagtgcttctacctcaattaataacatccatttgactaataatactggtactgaaattgaaacaaacgatgcagttttaaacaatggtaaatatactttaaatgcacaagtaacaataatgggtttgacgccaacttcaactgatcgttcagttactattgttaataacaatggtgaaattattggttctgctagtgttaatgcacacagtactcttgcacaaggtaatcttgaatttgattttgcggtcaagaatggtcgattaagtcatactagtttgggtaatattactggaaatactattaaagtaagcaagaagaaagttaccaagaagaaacataataaagtagctcataagaagaatcacaaaaaggcacataagaaaactgtcaaacatactaaaaagagaaaataatttaaaacgaggcaattgcctcgtttttcttttgctcttaaaaattaagctaatagttatcttagactacgactagagctaacgagttgcattcgttaacttttttatcattatgatacaggtgcaatataaaaatatttaaaccatttaaggttattcgagaggttttagttaatgcattgattcattatgattatcagattcaaggctctgaggtaaacttcaatatgttcgatgatcgaatgaaaattatattgcctgatagcatgattaacgagaatagaatttaggataataatttactctacgagaaggaacgaaataatctctgacatttttggtagactacacttcaggataagaagaggtcatttcaagataatataattaaaagatggaaaatagaaaaagccatttcagcaaaaatgtgactgaaatggcttttttactcttctaacaaccaatcaagcagtatttaacttgaataccatcaattgttccaacatcaaattatccatttttcaatttgagaaccataattagcatagatactgttttttttataaaacataaaattgggggaactttttcttttgctctaaaaaggcatcgctgttgcgacacctttgaaagataattttactgtagattattgattactgtttactgataaacttcatgtactagtttgataatttcatcatggctaagcatatcgccgtaattgtttgtgagttcttgtaaggcagtgtctttagtaccacccattcgtttaatgactaggactagcttcttagcatcttctatttttactttcctagcgacttcattcatttcatattccaacttgtccatatcttcgacccactttccgctattcacgtaatggtcgacatccttttgcaagctggcgatgtaaccttcagggtgattgatgattccattcatgtaatccaagaagtcaattatcttttggttcaggtcatgattattgcccttagaattgaaaactttaacgtgcgtaccagtctgaaattcaattcttcttattgctcatgacgtgaccaaagaccaaatcgtcagtgcttctcggatatcgactttttattttaatcatattttacctcatttcaattattgcttcagcaaaattaccctctactacttattacgcaaaaagtaggtaaaattttttatgaaattaaattttgttacaaaatgaacttattgttccatcacattacgtaatttacctaaaagctgctttttcaatcgtttcaacgtaatacgcggtataccgcattctttaactagctgcgtaattgtctttttctcaagcaaatgctcaaaaagaattacttgctcaagttgacttagtttcttaatctcattctttaaagctacaagattatcccatgcctctgttttacctaagtcataagcctcgtcaattgcagtattgcgttcacatacgcgttgctctcggcgcagagcatcgattgtttgccaaagaacctttttgaagctaagcttatcaatctcactgcgaaccttttgcccatctaatttgcgcaacatctcggcatacaaaattacaccttcttgcaacagatcttcatagagatgatagtccggtcgaacatgtgccgcctttaaggcaccaccaactaacttacgatttttccatgcttcttcgaaatatttttgacttgtcattgtgacactctcctaaatgatgtcacaagcgcttgtgcactattagattagcaagattggatctgcaaaaaaacttagtggtgagatgctctaatcccaagtgtcgcatgtgtttgttaatttctacgataagcaaagtcaagtcagatagtacctgacgaagaacagatgatagtcaaaaaagtgcaaaaaaatacagctcatgagagctgttaacgattatatctgatcttaataatctgtttagtaaaaaagcggtgttcacggtgcaaataatctaatggcttaaattctttcacaatcgtaagtaggtgtaagttcaaaacatgattgtagaatttgtctgccagctttttaaaactatcaatagcgtacaagtccagttgcacataatagttagaattatgcaggattgaatcagaattaatggctgttacgcgaagattattttcttgcaacatatgctgataatataagtcagaataataatgattatgaaacagatactgaccaattatcttcgtaagattgggcttaggagaatcaaaagcaaaattataaaccaagccgttttcatcaagtgcaatactgttgaaaatagcttgatcatggcgtttgacgtggaagtctttaatccagtgcaagcaaatccagtccgtgaagaagtttccactaaatgcatgcattgaaaaataaagcacattgtacatgacaatcccttgatagatatcaactccagcctcgcgagctagcattctctgccaaatcatatcgcaatgtacggcatgccgcatcaatccttgcatcatggcatgtgttgacttctgactaagcacaattccacgattcaggtcgaaggctactgccttatatttgcctaagataggattttgcttgaactcatagactgccaatgtgttcttattgagtcgatatttattgtcatacttgatgtattgctctaattgcgagtcattctcaattctccgcttggtaaggtccttggaccaattacgatattttatgtcagtgggcaagctaataatccccaagttacgttgcttgtaggctgacacatccatcacactccctatgtttgaatatatctatattgtttcaaatattgaatagtattatacagtatgaagcattgattgtatagctagaaattattatgctgaaaaaaacaattttataaaaaattttgccgattttttgcgtaataaataatagagggtacattttatcctactattttttagaaagaggtgcgcaatgaaaaatacgcacaaacaaaaagaattatggtttggtttttcagaagataaggtttttggcgaaatcatgtccaatccagctttctgcaagcatgttttgcaaggaattctgccggagatcctaattaagaagatctttccgcctaagaagcaagaagtaatcatcgatcctgagcatcgggatcaaaaagatgtccgactcgatattttggttgaggatattaacggcaacctttacaatattgagatgcagcggtcagacgatgacgatattgcccgtcgcatgcgctattatgcttcgaaaaacgatcaaaggtatactctccaccagggctatacttacaataatttgaaaaatgtcttcattatttttctttgcacgttcaaaactaagcaaaaagttgcaatcaagtctacataccaaactattaatgtagacaatcatgcagatatattgcaggatggcttgactaaaattataattaattcaaacggagttcctgatggaaccgagactgaaacattacttaatttagtcaaactcatgaaagatttaccggtacatggcgataaactctttgataaggcacaaaaacgcatcgaatcaatgaatgccgatccagaatggagggacactattatggattttgaaactagaatgcttgaacgcgagcaagttggtgaaaagaaaggtcgtatggaaggcgagaagaaaggcagaaaagaaggcgaaaagaaaggcctacagcaaggccttaaaacaggtgcacttacattagtcgcttctttgaaagatgtaggctgcactagccaacaaattctgcaacaattaaagcaaaaatatggcaatgtgttctctgataaacagttagaagaatttctgaaacagagctaagttgtaacaacaatattttccaagatgtcgcataagcggcatcttttttagagccaaaacattaatttaaacgtaaatactgcaaacaaaccctgaatatagaaaaatatagaaaaatatgctaacatgtatatataaaagtgaaacgacttgcatgtgcgagagttaagacacaaaaaaatcgctactctaatcggacaaatgagtaacgattttttgtttcaccaaattttatagcattaaaactaaatgtattggctgaggctagtgacgcttgtgatgtcttttagagcccaatctataatttttacgccttttgctatgaccattgcctagccgcttgtcaaatagtctctctaagacataagaaactacgttcactaaaagtggcgctaagatagagcctaataaaaagtgaaacaaatctagcatgtgttcacctcccaatgcgagatctgatattggaaggcataaacgtcaacgtttattataacaaatggtttatagagttggatttaaaattagccagtacatggtgacaagctttttgataaggcacaaaaacgtattgaatcaatgaatgccgatccagaatggagggatactattatggacttggaaactagaatgcttgaacgcgagcaagttggtgaaaagaaaggccttaaaacaggtgcacttacattagtcgcttctttgaaagatgttggctgcactagccaacaaatcctgcaacaattaaagcaaaagtatggcaatgtgttctctgataaacagttagaagaatttctgaagcagagctaggttataacaataatattttccgagggtgtcgcaacaagcggtacctttttctagagcaaaaagaaaaacgaggcaaattgcctcgttttatcttatctactacatagacttaattaaaagtttgaagcctttacgtaagtcttttcagtgttgtcaccgatcttgtagtattgcttgccgttcttgaatgtgtaagtaccaccgtaagtaattacttcagtacccttcttcaaggtaaccttgttagcacgcttctttgaagtcttgtaaacgtatgcgttgtgcttcaaagtacgcttagtaccagtaatgttgtctgcgttgatgaacttgccagtagccttaccgttttcgattacttcgtagtaagccttaccgttgatagtagtagtgttcatagcaacagttactgacttgtaacgggtaagcttgtcagtaccaacacgcttagcgttcttgtcgtagaagtaagcgttgtgcataatagtcttgctttggcttggtacagtagtgtccttgccgttagcaacattaacggttacaggtaaagtagcgtcaacaccattaattgatgaagttacctttacattaactgagaatgaagttggagcagcaaaccaaccagcattgtcaactggaatattagcagcctttaaagcagcattaacatcagcaactacagccttttggtctggcatttgtgatacagccttaccatttgaaacttggtaagcagcaaagttctttaagatttcactagcaacagttgaaacgttcaaacgaccgttaacaccagcagttacattaactgaacccttagttacttgtgaaccgtttgaagcgttgtagaagttaataccgctagcatttgaaaggtcaagtgcattaacgtttgaaacttgaattgaaataggtttctttaaagtaccatcttggttaagttcaacttctttagtgttagcaaagctcttaccctcatcagttgagaacttaacattgctgttcttggagccaagagtgatagtcttgtttgcgttagcaataccaaagttgaatgatacaccctttacagtaacagtatataaaccattagcaagctttgcaaaatgagtaactgtactaccctttgaatcagtagcagcagcgttatcattcttagaagctaaagtaccagtgtatgattggccattgtaactagcagtaatgttaccagtaatgctaccgttaatagtttgtccatttacagtagaagctgcaatagcagtaaggttaggtgttacatcaacatcgtattttgcatcagctggagtgttgattgcggtaccatcagcattaattacagtgtatactgtgttggtagtggttgcagcagcgttaacagaaacagctgaagcagcaactggagcaacagctaataaagcagcagcagcagcgctaacaattcttaaatttttcttcatgtggtcttttcctccttgaaatataaaaaatgtaataggccataggttcagcatgtagggagcctataatgtacaaaattcttcaaagcaagatccatgagtttataactctcatgaggtagtagtcattgctgaaggatcagcatgcgtacaggcgacacgcctgaagcacgtcctattacttaccacgattcatattgtactaacctcttgaaaaaatagcaagttaaattgactacaatcttgcttttgtaataattcacctattccctatcccaataccattcacacaaatctaaaataacaaaatgccgtaatcctagacacaacaagaaaaagcgagcatacgcccgctttactgtttctttactttttcttaaattttacaacgatgtaacaaaatcaattgaaaaagtaatattactatacgatttctgttaaaggtctaagtgtgaactctacatcttgcgatattttctcctgagccttttgaccaagctaattagttggtcaagcaagtccagattagtcttgcttagctgcaggctcaactgcagattctgctgaatcattaaagatatcagtaacagtgcgttcaatgtatgcagctgattgaggagtgtgataatatgcaacaccgtctttctcgaatgcattggcttccgcaatcgtattcatcgcaccgcgtacttgatccgcagttagattatcgactgcatcccccaacgtaatactaattttcttcttttctccgttcaagaaagttaacttcatagtcttagtagttttagccatcattttttctccttatttcctaaatatgttcgttaatttattcagctgctggtacaagacgtgacttctgcactaagtatgcttcatcaagtgagtcttcttgcaaactagcaattgcttgacccaccttttgcaactcatctgccttagcgccagtctttacgttcttcaagttacgggtcttttgcccattcttatacttcttgttgccaaatacatattggattgattgttcagttaattcgtaattcatatttttcttctacctcttaataattagttaaaattgagtattttgtaatcaacctgccggccagatgtcttacactataactaacgattcaaagtcaccaattggctcaaattcgttaatattttttctaagataagggagagttgtcttaatatgaagaaattagtcttttggggtgttattgctgcgatgttcatcttaggtggaggtggcgccggtgcttacattagccatgccaacactcaaacgcacaataatacttcctataataattccaataaaaagaacgctgatcctgaccagcaaaaatctaataattctgatgcagattctaacaaagataattctagtcaggatgattctgcaaaatcctcatctgataaggataaagagcagtccaagaagtccagctcatcaaacaagaagtcagatgatcaatcaagttcttcatcttcttcaagcgatcaccagcaggaacaatcatccagcagccaatccagcgcggcttcctcaagcaacgatcaatcatctgccgtaagttccagctctgctgctgatgataacaagtaagcaaacgaaaaaggagccaatttgtggctccttttgtttgtgctcactgtattcacagtatatacttaaataataaaatatttttagcataagtcatgtggtaataagtcaaatgaaaggcgatgatatttgttctttttgatcataaatttgagtatatgaaactaagccttggtaaaggttgattttttaaatgttaaacttttgtttacttttaaatttagaccaatttttgaaattaagacctcggtgtcctgtacagtttgtcatctttgagcaatttaaagataactcgtactaattttcttgcagttaatgtgcaagcacgtttatgcggcgagtagacagcttcatcatacttcttttggtaatattttttgaaaacaggatcatgtaatcttgctagattggcagcttcaatcaagtaatatcttagatatctgtttccagtcctggccattggagtatgttcgttgctgtgatctcccgattgatattgattccaggttaggccggcatacttagccagctgttcttctttatcaaagcgatcgatacttccgatctcagcgataataccagctgtataggttttgccaataccgggaattgattccagaattttgctttctggtaatgcatcaacgatacgatcaattgctttttctagatctttaatagattcattaaagctttgaatcatgttgtaatgaacagaaagcactgcatcaattgaatcagtcattactttgcctaagcgatatgaacctctaacagctttcttaattgctttagccaaggtatctggatcggaaaagcgtcctctgcctttaacctgtaagtaagaaattaagtcttcggtaggcatatccgcgatctcatccagagttttactatcggttacaatagacatcattgtagcaccgaaaagaggagtattaatcttatctttatcgacagtgattagtttattaacccgataatataaagcttcaatgaagtgctgtttggtacgagtcagttcttgaactaattcatatctggtacgcgttaaacgctctaaagcaagatagttgtcttgtctggcaatgcttactcgataatgtccaaagcttagatacaaagcaatgtaataagcatcgagaggatcagttttactttcttcaaagactttatgaaacctgctggtttcttgggggttaattacatcagtctctacattgagcttttgtaaatcttcgtcattttggaaaaagtaagcaggatgaaaactgtaaatagatgtagcttccatgccaataatgatttgatcatagtgtttattttgagctagatctaaaatttgttttttcagttcactagcaccataaagatcattgacaaagctatcgttaattaagcgtttgttttgatcttctgaatcaagtgcaacgacctgtaaatctttagaactaacatcaataccgacaaataatttcattggaaatggcctcctttctttcaaatttctgatcatagattttgatcttcacatgttaacccctaattacagttcttaagttcaatctcgccagtataagtattcactggttgcttctttgaaagctgcacctaatcccaattgctcaaggactagcaaaaagaagcaatcaatacagcatgtgagttagagcataaaggaactgtctgggtggcagacttataaagcagacaaaactgcaggaggtgataacctagaccagttgaccaaagccaatgacaattagaggctaacatgtgaagatcaaaaagcaaatactaatttgattaattatcacaatatgactaattacaatttatataatacgaggaggaaaaataatgaatcctgattttgcaattgtcttaaattatcaacttaatgataaggctgatgccgactttttagtaaaaacagcccgtaatatcggtgctcgtgcagtgatgactgacaggcaaactgaagatttcaaaacagcttgcgctaagtatactatttttttagctaatccagaaaatagtactgacttaactaaggataacgtcattgataccatggtcaataaccgtaaagctggtaagactacaattattaatgtgcccgttgaagcaggcaagttttctgccgcaactcaagcaatgctggatacgatcaatgattggatgcaccaattcggtcacgccttcaacgaaggaaaaactagtgctttaaccagtagcgatggctttattttagaaaatcgccacgcaaattaccaaaaatatgtcttcttacctagtcctcttcctgacaaaatcgtggtagaaggcctagtcgaagaacctaaccgggtagaatggattgaacatcgaactgatcttgattttaactataaggatcaaaaattaactattaacttagtcaaaccagatgatgagtttgcttggcaagtgttgcgaattcaagcccaccgacctgaagatgacattttagaaacgaaattttagtaaaaaggcgttctttgtagcagaacgcctttttacaaccttatgtaattgctatttctattttcaaaaaaatttattcttgcttaagctttaactactgaaccattatcaaaaaattctctaaaacgacgtgcttctttatccagagtaatttcatcattaacttgcgataacttatagccaacaaaataaggtggcgcttcaaaacgtgtaatatatttagcacaaataccgtcatcattacgcggataaaagaatagattataagaatcgcagcggccattatacatgatatttaacaaatacttggcaccactttgaatccagtcagcccacaagtcaatgctatttttatctaacaagttaatattgagctcagtgtagccttgaacggggtgttcagcaatgttaacttctaccccacttttttcaaaaagggtctcaccttcaaaattattcgggtgaatatatttatagccatcttcatgttcaaagccaactatctgcatatgcgggtgaatcaaggaaccacctgaatgtggaccatagttcttgtaccaaacaattgactcatattggtcactagcctgcactttttcaaaacaagctagcgcaaaatgcatcaacttgcgattatgttcctgcgtataagtactaatatcgccgttatgatcactagattcaattagtacagtctgccaggtatcgcgcaaggtcgggaacttattcttaagccaaatcatgtcatcttccttggcgtaaatatcagttaaattttcaacatcacaaaatgggcaaacgtttttcttcttatccttacgataagattgcggtttgcctttagcaatgctcatttgaaaaacaagtggatcattagtcatatttattcctttttttatttaaaatagtttaaaatctaatgggtaaagttttactataatgtaaaatattttgtagctttactagcataaaaatacttgttatactttgttaaagcaaacgtttattcgaaatttatcaagagacgggttttaataatgcaatctagaacagaaatgagaaagcgaaacaatcgcaacaatctctatcttattattattggcataattgtcgtaattgcaattatttgtggctttgtcattcataatcaaagggtagctgctgaacgtagccagcgtgaatatgcttctacccacttcaaccctaatgtaacaatttatggtgtgcaagtaggcaagcttactgttaacaaggcgactgctaagatcaataaacaagctgataatgtcgtctttttaagaaataaaaagattattgctgaaaaagacgacaaggttcaaactatcagccaagctgaagttaaaaatattttcactaagcagcatactgatttgccaagcaaacaaaaatacgttttcaaatccgccaaaatagatgaagcaaaaaagagtttgcaaaaaatacaaaatgctgtagtcacctataagatcaatggccaggaattcaagctaaaagctgatgacctaattcacgaagttacttacaaaggtggtaaatataaattcaccgatgtaaaaaaactgcatgctaaaatggaagcgatcgatcaagaagtcaaaactctaaagaagagttataaatttactgttcctactggtaacaaagtcaatggcaaaacgattacggtaaaaaacgaaagctatggttggggaatttatgtcaagaaggctgtggctgcagtagaaaatgcttttattaatggtcaagatgttgttggtggtagtaagtatatttatggcgagggttatagtacctatgctcatggttatggcaagagcaatcatggtattggtaaaaactacgtcgttgtctccatcaaaaatcaggaactatgggttgtccgtaaagggaaagttgccgttcacttaactgacgttgtcacaggtactgaaaataagagtaacgctactcctaaaggtgtttggtatatcatgtacaaagaatcacctagcgtattgcgtggttataacgacgatggctctaagtatgcctccaaagtacaatattggatgccatttactttgagcggctgtggcttacatgacgctagctggcgtagcgattggagtaagtcagcctatcttactggtggctcacatggctgtgttaacattcgtccagctgaaattagaagtgtttggaacaacgttttaactaacgatgctgttatcgtatattaaaaaataaagattaatcgcctacttcaattgaagcgggcgatttttttgcgtaaaattaacagaaaagatatagatttttgaaaggatcaaatatgttagtcatcggtattatttgcttggtggttgctgccatttcttactttaaataccttagtgaaaagaacggacaagctaaccaaaaacaagctgaaaacaaaaatgaggcaaaatggcagcgcactttagcaatcattttcctcgttttcggaattttattaatcggttattggattgcattacgctaaaaaagacgtgaattttcacgccttttttaaatataattgattaccacattacccatattagctcttccctttaaaactaaggtaggaccgccgccattgctttttcctttaactattacattaccaaggctaatgcttaattgattatcaatctgccatgataagggaacgtagagatttacatttcccattgaagcagttagattaagcacgactgtatcacctgctgctttagcatcatcaagatagatattggcattaccgaatgaagcttcaagattaattgactgtaaattttgtgaatgaatataacgtgaagaatcgccagccatcttttgattaattacgatattgtcaccatcttcaatcacatcttgaacatgatgatgtgttacttttgtctctgtatcagcatcgtcactatcatcgtcatcattccaatgaaaactcttcttgataacaatttccggatcttttttaaaaagcaagctcaatcccattgaaacaagcaaagcaataaacaaaatcatccaagaggataagaactttttaatgcccaggggacctgcataagtaattactaaaaaagcaattgagaaaacggacaccacaatgctcttatcaagcaagcccttaattaagcaagccacaaaaatgactgtcaaaataattgtccaaacgctaattttgaagcttaataagcctaattgactgatcaccaaaagcgcagctgcagcgattagtcctactccccacaaaattcttgcaaaactgtttttcattataaagaccttctttcatctaagcatgtgcgtaattctttgtagtatcgacgggatgcatatacagttttataagtatcatgaaactgtatcttgcaatctgaaatcgaccgagttaaaccataaatttgatctaaattaataattgtcgatttggaaatccgcatgaaacctgcgcccaaaatattttctaactcatacaatttatgtttaaccaagtatgccttatcttgtgtatgcaaaattacctgcttggcatctgtttcaaaaaacaaaatctcgttcagtggtaagtagtaagaaacattgtttctaaaacattcaatctgatcattgtgttcaataccttgtaatttcttataaagctgctctatttccggagaaatatttttagctttaataatcagttcatcttctacggcatctggatcaatctcaagttttactttcatgtttctcactcccttctgaatctgatatttatattaaaaaatatttcagatagcttttccatagttttgaactaagtggtaaattttggcttctaagtggcaaaaaaaataagacgacctctgtcgtcttattgcttattatcaatgtaaactagtaaaaaatgttatcagtccaaaaataattcctggaaaattagccgtgaatagcggccaatctttcttttcaccaagaattgcataaagtacccagatcgtgcaattaattgcagcaaccaacggctgaaccggattaccataatttccgttcaaattattaataatttgcggaatatatgaaacatacatcagtacagataataccgacccaatacgtccaatagttaaaacagtttttcggtctaatcctttgaattttttcaacaaatcgctcctttgtgcttcattataagaaaagctagagtcgattgcaaaaatcatactttagtggacaccttccattagcacattaattctcttaactaaaaagaacattattaccgcaaaggctacactgaccaaaccaacagccatgaaatattgtacttcagtgccagttgaatagaacttaacaatttgtgcattcactgcttgtccagttgcatcagccatgaaccacatactcatcatttgcgaacgatatgcattaggggccagcttggtcgtaattgataaaccaattggtgaaatcaacatttcagcaatttcaactaagaaccatgaaccaactagccaaaatggactaaccttgcctgctgtaccataaagcatccctggcaaagccatccacatataagatagaccagcaaaaactagccctgctgcaaacttgcctggagctgttggctgctttttccaatgttcccaaagccaaacgaagattggcgttaaaatcataatgaataatgggttaagagactgaaagttggctgctgtaaagtgccaattaccaatatgaagcacggttctttgagcggcaaacagagctaaaactactgagcctgattcttcaatgccccagaagatagctgcagcaaagaacaatggaatgtaagccttaactcgtgaacgctcaaccttagttacttttgaactacgtagcatcatcacaaagtaataaattggcagtgcaattgctaaaatagtcaataaagtaatgacattgtcaacgttcaattgaccaaagccggccattgcagctaatacaagggcaatcaccacgaacccaataactacccacttaataatattaagcaagtcacctctatcaataggatcattaggcgtcaaactttcaggagaaaggtattttttaccgccccaaacatattgcactaagccaaagaacatcccgattgcagctaaagaaaagccggcatggaagttcatttcattaccaaaaatatgaaagccaaaaccttgtgctgcccatggaactaaccaaggtgcaagaaatgatcctaagttaatcccaaagacaaagatgctaaaacccgcatctcttctgcgatcttcaactgaataaagaccaccaaccatgtcagatacatttggctttaataaaccagtaccaaccacaattaaggcaattgaagcatataacgccgttacaccggctggaagtgccaagacaatgtgacctaacatgatcaaaacgccgccataaaagacggtttttcttgaaccccaaacacggtcagacagccagccaccaactagggttgataaataaacaagtgaaccatagattgacatgattgatgcagccgttgtttggtccattcccagaccacctttggtgactgcataatacatgtagaaaagcaggatggcgcgcattccgtagtaactgaagcgctcccacatctcagtaaagaataacgtggacaaaccctttggttgtccgaaaaatgctgtatttgaatcttgtttccccaaataaaaactcccttcttatcatagataagcacaatagaaataattataccacgaaaaaataaggatccactttttacagcaatgtcattaagttaagacattgacaaattatcgacttggacttttaagatcattcatttgcgatttatcgcatttgaatgctcttttttcatgccaaataaacccaaatcttgtttagaaattaggctacacgatataaataatatacagctgatttgggtttgagatttcttttgtcttttcgtcctggtctgatcggaattgtgtaatgactaatttgaataagaatctttttaaagatttcagttgaagaagaaattatatacatagcctggatgacaaaacatgactgtttgaaattgatcgcatattgatacttgcattttttttgtggtacatatgcttgagcatcaatttgactgactgcgttaaacataatcatgtgggcatagatctccatttcaataaatctatcctgcttggaatgaaactgtacgctacctaaagcatatttcaactttttgaatgaagtttcaatgccccagcgcaaatggtagatttctttgatcctttttaagggataatcggctctatttagattagttagaacaacttcccattcttctttgcctgatttaggatcattaattctaaatttacaggcacgaaattttattgtacataactctccaaagtcccagctgccatctttggtatttttagaccgatattttatatattgacggtaatgatggttaaccaaatgaacgttttctgtagccttatgggtttcataataataattagaggtagtcacccagcaagctatatccttatcacactcttgattaggcaactcagctacttccttaaatgcgccatatcccgttttagtacgtatgacataataacagttaggcaggcgattacaattttcaatcatgttaaagccggtataacctcgatccatagtaactatatatggtccgcaatttagctttttaagcatttgaacggcggctttacgttcatccatctttgacttaggctgaaagatgcagtcttgataagtattatttaacaggtcatagagtgcattaacatgaatttggcaatatggctttcctttatgattgagatttccaacgatattctctgatttaggattccagatttgattaaaatcagacccatcaatggcaaatatacgatatttatgatcaaataactggatattaaataaattctgattaaatacagttagaatatgcttaaaacatgcgggtgaaagctgacctttgcgttggacataagcggaagtactgactactttatcgttatttttaatagctttttggccaaaagctctaaacaactcactggtcaaatcttttccttgcatattaatagtagttttaatgactgtagctgcatctaaaaaccgcttcctagtgaaggcatgaggatcatcgataaaatcatgaatatgctttccagtatcattgataatttgatcaagacgatctaaaatatttctgtgaagggctttcataattaacaccagctttctggcaataattttgaaggtttaataatttaatcagagggcgaaaaggtaggttcttttcgcctttattttatgcaaaaaaagaaccaaatcataatgattcggttctacagagattagattcaatttgtcaatgtcttaacttaatgacattgctttttacagtgaatccttatttattaggtaattattgcttcaaattaattgattgccttagcaactgcgttgttaacagccactttttcagcttcgatcaagtcaactttaccttcaataactttaatatccatcttaatttcacgactaagaagtggaatatttacctttggttcaaagaattctttaaattctttaagtctagttggagtatggaagacgcgagtagttactgtgatgaatgttgtaaattccatgtcaccaccgacagtcttatcaagccaatcccaatcttctctaatccagtcccaggctgcttgttgaccatgatggttgctgagcaaaccagcataccagccacgcaagtcttgtggtttaattacgtcagcattttcaaaattatcaacaattaacgcaacttcggccggatcaatcgtactagtaattgcgctacgaagatcaactttgtatgaaggatcagcagttctttgatattccttgattaggttttcgattaggttgtggctaccaaagttctttacttcattgattaaaacatacggacgaacatcagcattcattgcctctaagttgtcttcattagcagtgaaaatctcatgagctgttttaattgagtctttattttcagcgtaaagactggcacttaattcatatggacgaatttgtgcatcttcatcgctttcacctggcttaactttccagcccaaacgagcaacttgaccagcggataacttgtcataaagcttctttaagtccttttcttgagctgattcaggttcaacaaattggcgcaacttagcagcagtagcgtaaagagcattaataactacacttgacttcgagtcagcaaatttagtcaaaagtggcacaacagcagcataagaaatttgtttaccttctgctaaaagacgtaagtcttgcaataattgcaatttggcaattggatcaagttcatcaacatgagccaaaatatcatcaagcaaagtcttgtcatacttaacgataaagtgcgagttgttacctacattaattctaagtgggtgacctgcttcactacgtaaattcttgtagtaacctaagtcgatttccttatcagacataatcttaggtgccttgaagttagcattcaacggaatttgccattgtctaccaacgtctttaccttcaccaacgaagaattgttgttgtgaaagctttaagtgaccatcgctactatcaacatatgcactaactactggataacctggttgctttaaccatgagtgcataatcttgccaatatcaaggtcagttgcggttgaaagagcatcccaaagatcgtcaccagtggcattaccgaacttgtggtggtcgaagtaatacttcaagccttttcttaaggcatcgtcaccaagaagtgaacgaaccataactaacattctagaacccttggcataaacaatggcactgtcgaaggcagagtcaatatctgctgggtcattgatttccatttgaattggttgaacaccgtcagtagcatctctagtcaaagctgcaggtgcttcactggtttggaacatttcccaaatatgccaatcaggttctagaccatcaactgccaagtattccatcatgttagcaaaactttcgttaagccataaattatcccaccatttcatggttactaaatcaccgaaccattggtgagccaattcgtgagtaataactgtagcaaccaatttcttcatttcaaagctagtattgtctggatcaagcagtaaatatgcttcacggtaagttactaacccccagttttccatggcaccagcactgaaatctggcaaagccaattgcaatgattgtggaagtggatacttagtttggtaaaattcttcgtaaaattcaattgcgttcttagcaacacccaaagcaaagtctaattccttaggcttgtgggccttagttgcataaacaccaattaagacgccatccttagtgtgagtagtctttgattgcaaatcaccaaaggcaaaggcaaccaagtaactagacatgcgaacagtttcttcaaagtggtggtagccgtccttgtccacttcaacctcaggcatattggcaagagcaacttcgccatcttcttcatcccacttaagcgcaagactaaaagtagccttagcttctggttcatcaacacatggaaaagcttgacgagcaaaagtagtttcaaattgggtaccaataatttgcttcttcttaccttctaactcgtagtatgaaggataaatacccatcatagtatcagtaagtggtgcactataagcaatttcaattacagccttgctgtttacaccagttgaaattttgatagcttcctctttttcaagtacttcaaaatctacctttttaccatcaaccttaacgctgtcaatggtcatatatttttggttaataaatactggattttcaattacttcaccggtaatcgttgaagtaccattaatttctttttgtttacggtttacgttaatgcgcaaatcatagtgttctggatggaaagtttcataaaaacgtttaactgtcattttttacctcctattaacagctcatttacttttaattctaccaaaataaagaaaaaagcgctcaaaaaaggctatttcttattgattgtaaggatgacgtttcagttctgtaacattgctgtcatattgagcttgtactatagaagcatagtcattaagaaataaataagttttgaaagaattaattaaatttaataaggaatgaatacatcaatgaataaacatgttaaatctactttagtaaaaatcttagctgccttagcacttgcctttgcttgtgttgcagttgcaaatgctttttctaccaatacttcaactactcaaactgttcaagctgcaagaaagctttcaaaagctgaaaaagctgctaagagatggatcgcaatgcgcgaatcaggtggtagctacactgctagaaacggtgtttgttacggcaaataccaattaaacattggctacttacatggtaacctttcacctaagaaccaagaacgtgttgctgataattacgtttacggtcgttacggttcatgggttaacgccaagagattttggttagctcacaactggtactaaaattaaattcctttaattcccaaaagctaaagaaaaccagcttagtccaattgactaaactggtttttgttttactcaaaattatcttgcttgataaaacgataaagtgcaatgactaaaactaagatcgagcacgccattcctacataggccattgttccaatgtggacagcattgtcagcagcttcacgggctacttgattttccattgcatagcccacaacccatttacgcattaataccggcgtcaagacaaaactaactgtactaataattgaagtcactaacgctacattacgcgaatatggttctttaaagaactgtgctaatacgcagaatgctggagcaatcatcaatagcaagatccacataataatccagcgcccagaacttgaattcatcatctgcgcactattagtggcataacgatatgagctccaaagcgatccaccagataaggtattaagcaaactcaagaaataagatccacgttgtccataaacaccaccattattggacagaataccttgaacaagttggaaactatcagttgatccagccgatgaaaaatcgaccgacacaacttgcttcatataagtagctaaaaacatggtaactgagccacctaattctagtgctcttaacatgcttaattttcttgaagctttcagatgaaattccagacttaaaactcgatcaggatggtgactgtgaccaatgataaaaatccctgcaatgacgatcaaggctaagataaccaatccccaccagaatttaatcatggcgaaaaataaggctaaaacaataatcgcaaccgaaatatatggtcggtcagaaaaaatattccaaaagttcaacttaacatgatggtaatttttccttgatgcatttgcgacattttgattaataatcggctgaggattactaatttttctgctgcgaaattcttcacgtgttgttgctcttgtcttagtataatcggtccgtgaacgatctgcgccggcttggccgtgctcttttttcatgcgatattcacgccgcgacatatgtgccataaactgcagcccccttctcaaagcactatagtagcacattatcacttttttgcttgaattaagaatgaaatttcaaagaaaatttagctttgttttgcatgtgctaaaatgaatattaataattgtgctttttttagaaagagataactttttgaataaaactaaatcagcaaaactgccagctggttggcatatggccttttataccttatggctcggttgctttatcactgggatgggctattcaatgacaatgccctttatttcactatttatttcagatttgggtaattattctaaactgcaaatcaatctttattcaggattagcttttgcaatgacttttattgcccaggcaatagtttcaccatattggggcagcctcgctgaccgcaaaggtagaaaactaatgtgtatgcgtgcttctggtgtgatggctttaactattaccctaactggatttgcacccaatgcaatttatattattgtaatgcgttttattcaaggttctttttctggttatattaacaacgccaccgctttaatggcaagtgaaacgccgcatgaacgtagcggctgggtcatgagtcaaatgatgacggccgggactgccggaaatttggttggaccgctattaggtggtgctctctccagcttctttggcaatatgtttggtggcgcctgggggtatcggattccattcttcattaccggtgttttaatgttcatcgtctttttaggtacaacgttcttagttcacgaagactttactccaatttctcgtgaaaagatgaagccgatgggcgaaatcatgaaaagtttgcctagcgtgaaattgattgtggtgatgtttattactaccatgttggtacaatcatcaaccatgtcaattgatccaattgtttcattatacgtaaaatcaatgatgcctcatggcggggatgttgcctttgttgcaggtgttgttgcggcaacgcctggtcttggaacgctaattgcggcatcgcgaattggacacaagatggatgaagttggaccgttacgcgtattgcgaatcggcttagtcgtcggtgcccattgtttgtaccaatggctttgactaattcgccttgggtactagcaggactgcgcttcttattagggattgctagtgcagggatgttgccagccgcacagacggtattaactttaaacacaccaagcgaaagtttcggtcgaatctttagttataaccagtcatttcaagcagttggtgccgtgttaggatcgttaatgggatcgactatttccggtttttcaaattatgcaacggtattctggctaactggatttacgttactgatcaactttgtgcttgttttgatttttgcttggggaatttcttatcggaatagataggttaagcatattcctaaagtatggaatttaaaaatgtaataaaagagctgtaaatatcacaaaaaatatttacccggatttaaaattgaagtgcaacactaagtgttaaacaaaaaggccatgaagacctaaacttgaagtgacgaaaaatcaagaaaggaagatcttcatgaccaattcaaattctagcatttctaagcactatcatcaattaaccagcgtacaacgtggacaaattcaagcaatgctggattccggcataacttcccgtactgttatcgctcaagaagttggctgccataagtcgacaatcagtcgcgaaatcaaacgcggaagcgtcctgcaaagagacagcagctatttattgtatgagcactattacgctgatactgcacagatttattatgagaagcgtcgcaaaaactgctatcagcgcaatccattgaagcattatgctgtctttttgagaatgctctccagacgctttaaagctaaatttgatgccaccagcatcgatgagttcgttggtgaattcaaaaggactatgccaggctacccttgtcccagcacaccaaccgtctatcgctatattgatcagggcttgctggacataagcaatattgatctgcctatgaagctcaaaagacgcaggaacaagcgtcatcacagccatggcggtcacgctttgcacaagaagcatcttggcaattccattgaacagcgtcctaaggaggttgaagacagaaaagctccgctgcactgggaaggagatctggttaaaggcgtcagacgcaagaatcagcctgctttaatgactttgactgaaagaaccacacgctttgaagtagttatcaagattcctgactatcgggcaagcacatgccaaaggctgcttcaaaaggagattgacagacatcctgcctggtttaaatcaatcacgtttgacaatggctctgagtttgcggatatgaccaagatcaagggctgccagatttactttgctcacccatattctccatgggaaaggggcaccaatgagaactgcaatggtcttttgcgtcaattcttccctaagggcaagagcatgaaagacaagtcaaaagcttatgttcaacaggcaactgatgccattaaccacaaatatcgccgaatcctccaatatcacacagcagaggaactcttcaagcaatatatctcttcataacctaactgttgcacttaatttgacaattcaggcaaaaaatatttacagctctttattattttcaattttttacgctaccatcttttcataaatgcgatacatccgattatcataagcgcacattgaaataaccagattatagcccgcgttttctttctgccacttttcaattgcgtcaactgcgatcttagttgcatcttctgcaggatagccatacacacccgtagaaatagctgaaaaaattacgctatgcaatcccgctttctttgccaaagccagtgaattatagtagcaagaagctagcatatgtgcatcactagtcttgccagcataaactgggcctactgtatgaattacatatttcgcaggtaaattatagccatgtgttatccttgcttcacctgttggacaaccatgcaaagtcatgcattcctcaagtaaccgtggaccagctgctctatgaatggcaccatcaacgccgccaccaccaagtaatgaattattagctgcattaacgatcgcgtcggctttcatcttagtaatatcgcctttaataatttttatgtctttcataattatgtccttagaaataaccaacatttctttctaccaccattctaacaccaacaacatcagttaggctcagaaagaatacaaagcatattgttatttttatattacgaacttgaattgatttctatctttagtatcctaatattaattttagcgttataggagcaacgaaatgaaaattttacgacgcagtttatgcatcatttcgatcaccttattttcttttgctttgagcattctcattcctagtgttcaagctagcaaaatagttttagatgatctcatcatatttttatatttaattggaatcgtaattctgggcattctgttgttgtctaacaaatttgattacctatcactcagtctaagcataatcttgctactcgcaactatcattgcttggatcagattcccaatgattagcattatttatactttttttatagcttatctgagtatatgcttactaacaatttttattgctaaaaggattaagaaataagtcactatgttttctaagaaagaactaaaaatcatcaataacgcattaattattatctatttgctttcagtcggcccaacattcagagactgtaaaatattttgtgtaaggatgaataattccttaaatttatttcttaaaacattagaaaaaggagttcctttctcgtatgattggtttgaacaaaaaaacacatacagaaagaagaactccttcatgaatgattttacaaaaaatatagcacaagctctattcaatcaagacaaaataaacgatttattgcgcaaagagctacaacaggctgttaataacttgctagaagctgaattgactgcctttctgggctatgatccctatgccagaaatggctggaatactggcaattctagaaatggtgcttatttccgcaaggttgatacgcagtttggaccaattgaagtgcaagtgcctcgagatcgcaacggccagtttcatcagcacacgctgcctgactacaagcagcactctgatgttttggaaagcacgattatcaagctctactccaaaggcgtaactaccagagaaatcgctgacttgattgagaaaatgtatggcagtcattatagtccagcccaagtatcaaatatttccaagcagatgctccccaaggttgaggcttatcacaagcgcaagctaagcgacaagtttttctgtgtctatttggatgcgacataccttcctttgcgccgagaaacgtttgagcgtgaagcagtctatattgccattggcattaaacctaatggacataaagaagtcattgactactgcattgcgcctagtgagaacattgaagtctggacagagatgcttcaaaacatgaagtccagaggcttgaagcaagttgagctctttctttctgatggtgttgttggcatgaaagcggccttgaccaggacttatcctaaagctcattttcaacgctgcttggttcatgtcatgcgcaatatctgtgctaaagtccgggtggatgaccgcgaaaagatcatgaacgaattcaagcagatacatcaacagacaagccaaaaagaagctgcagctgtcttgcatgaattttatgcaaaatggaataaagcttatagccatgttatcaaaggtttgagggaaattgagcccgatctgctggtcttctacaattatcccaaacaaatcagagcttcaatttattcaaccaacatgattgaatcctttaacaacgtcatcaagcgtaaagctaagcctaaggcagaatttccaactgaacagtcgcttgatgtatttattggcatccaggcaatgagctacaatgaccgctatttcaaccgaattcataaaggctttggtcaggttcaggataccttagaatcctattttgattaaataaatgattaaaaaatcaatttacgagaaagaactatttacacaaaagatttgacagtttcaacattcatcttcggttttactaaatcaaatgatttcacaagtactttctttttaattgcaaatatcattttagtttgtttattcattatcattgctatcagaattgctaaaatcaatttcaggctaaagacacaatattatctactaggcttcatcactcttatttcaataatagaactagcctaccctggactgacattaaatgaacgcattagcaattattttgctatcggcaatattattttaggcttgctaactactaaaatctcaaagaaattagtttaaatataggacacaaaatgaaatatctgaaaacaccaagattaattaacagtattttgattactttacgtcatactgctataaattattgaattcttattactttaaaactacatcaggtattttcaatcattcaataaaaaataagactagcactaagccagtcttattttctattaatcaactattcttggggtgagaattgccatactgttccatcttggctacggtatgagccatcactcatctttgtaaatataaagacaacttttttcgtcctaattgtgtaaccgttttttgattcagttgtatcaactcggcccaaatcagccttaacacctgtttggggtggattatttttcttaatagaatatgcttgtaaaatttctttattaagtttagtcttcttttgctcagagttgttactatttttagcaactaaaatagcatgattctttgtaaaatacagatcaaaccaattacttaagcgattttctgtgttgtctactgttaatgttcgattaacccagtttttaggtaccgttgtttgattattgtagaaaaacattccaccaataactgctacaagtactgtaactactgcaattacggataacgtcattttctttttcatgatacgtttcctcttaaattcagcattaattatttggcactaagcctctcgaaatgagtcttacatttcctgaatacatgctaacccatcggtttctatttgttttaaaattgtgatccatccaggtactgtttctatacaaatagccactgtaggcaccatcattataataaactttagaaggtgttgtgttgagtaagttcattccatctcccctaccccaactactgtatctataaacattagatacatatttatgaagcggaccatttttgattggcccatacactttaacactctttgcttctcggactgtagtttctgaagcctgaacattctaactattggtagttaatactggagctacagttacacctacaagagtagcaaccactaataatattgactttttcatttttatttttcctcgtttaattttgatgttagtactactttcttacgaacagaagcaggtgcaggaatgctctttacatcatagctgtacaaatatcttctatataaggtagtagcactcttaccaactttttcacgcataacttttgaaagatatcctctataaccgttatactcaaaatagtgagtggcaccataatcataacttgaacctaaggtgatccaaattctcctaggtttatagtaatctgctcttagttttgaactcacagttgtttgtgtttcagctgatgcgctaacctgattcgaaactgtaaacaaactaacgccaactaatcctactagtgataatgaaactagttttcttgaaattgatttcatttttatacagataaagtaccttcactctctggccaaatcattattatttcctcctttcgtatcttgattatcccatgaaactctaatattacttctaaagttgcgtatcacaaaactactctttccaattagtcaccctatcttcatatcctagagaaataagcatggcttttacttctttagcttttgctatatttccttcatacaaacatttatagaaactcccacatgccttataaaaaagaaaatgattagtattgttcaaattcagtaagtaatctaaacaatttttaacctgatttccttttaagccataattacgccagcaataaaggtaattgatacaaatacttgctatcctatcttcatatttctctgaatatgaaaccttctcattgtaatgtttcaaaagaaaactaatataattatctgcttgttctgtagaaaaaacaggaatacagttatcgaataatcgcagcatatcaatattttctacccagttatcttttgcattaaattcagcaataattgtacttttgaattcgtcacctaactcatccaattgatttcgtacaattgctactgcaacaactactctgtacttaaatattctgctatcagataatttcattacttcttgcaaacattcttcgattttttctttatttgaaccattaaatgcacttttcagtttgttttcaagttttaattcaattaagtcctcttctgataaaaaatcatctttaatttgttccaaaaactgatctacatcaatatgatgggcaaacaagatcttaaatagactttctgcagaaattccttctattcctcgttcaattttagaataatggcttttatgaattattccttgaatcatttcatcttgcgttagtcctaagtgtattctttcttgtttcaaggcttcaccgatagtcatctttcatccctccaatttaacttcaactatactatctttttaattttctctccatacaaaaacgccttgctcaaaagcaaagcgttttttagcataagcaatatttgcattaacccttatcggcacctgcagtaattccgttaacgtagaacttctgcatgaagacgaacaagatggtaatagggatagcgatgattacacaccccgcaacgaattgtgcgaagtatgcggtcgcattacccttagctgtgtggaccatgttgtaaagtccatatgcaaccgtgtaagtcttagcatttcctgaagttgaaagaataatacctgagaaaatgaagtctgtccatggagcgatgaaagcggtcaaggcggtataaacgatcattggctttgaaagtggtaaaccaatgtgtaagaatacttgccacttagtagcaccgtcgatttcggcagcttcgtcgattgaccgaggaatagtatcaaagaatcccttagcaacgtagaagcctaagccggcaccaccaacgtaaaccaataacaacccgaagaggtttaacatgttaagacccttcaagatgtagtacaaagcaatcattgacatgaagcctggaaacatccctaaaaccaatgcaatttgtaagaatggttttctgaatgcaaagcgaagtcgtgataaaacgtaagcaactgaaatagttaagaaagttgaaattaccattgaaagcaatgaaataactaaagtattaatgatccagttaccaaatggatattgtggattagtaaaaataccaatatagttttgcaatgtgaatttttccggccagaaggtcgaaacgaatccagtatcattgaatgaaaaacttgctaagacgatccagacaatcggtaaaatccatagaatcgctaaaacaattaataggatataccgaaagattaatgagagccgtctttgatttgaatatgacttcatgtctagccctccttaaatgcattagtacgacgatatgcaatcagtgaaacagttgcactaataatgaagattaagatacccaatacggcactggcgttataacgctgttcctgaccgaaggtcaagttatataaccacgttaccagcaagtcagtcgatccggcaccattatacttactgttcattggtgcaccacctgtcagcaagaagataacattgaagttgttgatgttaccaataaattgttggataagtgaaggtgccatcacaaataaaatttgtggaaaagtgattgaacggaaaatttgtgcagcattagcaccatcaatcttagcagcttcaatttgatcttgtggcaagttttgaataatcgctgttgaaaccaacatagaaactggaataccgatccacatgttaacaagaataacggtaattcttgcaactaaaggtgaagcttggttatcaataaagtgaattggtgaactaatccaatgcaagttcatcaagatattgttcaaagcaccttggtagtccaagaactgcgccatcatcaaaagtgaaacgaattgtggtacagcccaaatgataacaaagattgttctccagaatcccttgtgcttgattccttttgattcaatcaaaagagcaagcaaaacaccaaagaagaaagtcgtagcagtagctgctacagcccagattaaagtccagcctaagactgggaagaaagtaccagctaagtcaccactcaaaacattgccaaatgcttggaagcctgtccatgagaaagcaattgggtgttgacgatcatagttggtaaaggccattgaaatcatgaagatcgttggcaaaatcgtaaagaacaagatacccaataatggaataaccatcaaggttgcgtgtaaccgagtatcaagcaaactcttaagttcttcaacgttagttggaatatggtccccatcacgcttcaaaatataattatgtctagttgagcgtaagttgacaatgtatagataaatgattgctacacataagatcaaggccaatacaccgaataacaaaatcaaaactgagtttgatggttgcttggttacataaacgccttgtgcggcatcataaacaacttttttggttttaatagtacctaatgtagctaatgaatttaaagtagggataccactgaggataaaccaaacaataaagataatttctgaaagtaagagtgaaataccttttacccattgtttgtttgccaaggcgttactacccattaagaagaatgataacttggtagcaatgtcaccttttgaccaaacctcgcgatatgttgctttaggagctacatgctttttctttagaaacataacttctccccttcttaggcaaaaaggctggacaatttttatttagcccaacccttgcttatgcttttagcaaattatttcttttcaatgttcttagcgagcttagcaagttgtggcttgtattgtgctggcttaatcttgccgtcgtaagtaccactgataagcggagctgcaccattccagaatgcggccatttgtggaagcttaggttgcaatactgagttacctggcttagccatttcgattacagcttcagcaaccgggtcactcttaacagcacttgagttgacagcgctcttcaatactggaatttgaccagcgttcttatgagcaattaattgtgacttcttgttagtaatgtaagcagctaaatctgaagcagccttagcattcttggtgttagcattaactgcgaagccttcaataccaaggaatgcttccatttgtacgctcttaccaccaacttcaatcttaggatacttagcaactgcgaagttcttacccaagatcttcttgatattagcagcgttccaaggaccgtccaaaatagcttgtgcgttacccttcttcaattggttcaaagcgtttgaagtttgcattacgcccttgttcttcttttgagctgcgtaccacttcaaagcattaataccgttttgtgagttgaaagttgagcccttaaggtcttcaccattcttaccgtaaagtgtagtacctgctgagaacattactggccacattacgtaagcgttagtaaagtcggtagctacaacaccctttgaagttaaagtcttccagtccttaacgtcgttagctgataacttagacttgttgtagtaaatggtttgagcttgttgtgcgtatgggaatgcgtaaaccttgcccttccaagttacaccctttgaagcaacatcgacatagttgtcttggatatccttagttgctgatggtgaaagtgggttaatgtaaccagcttcagccatttgacctaattgatcgttaggaacttcaaagacatcagcagcctttgatgggtccttaccaacgtctgtcttagcgttagctgaaccgttaggactttgaactacacgaaccttaatattcttgttcttcttagtaaagtccttagcaatttgcttgtagtaaggaacttgttcagtatccacccaaagagtcaagttagccttcttgtttgaattactgctacttgatgatgaattacttgagccgtttgaacatgctgctaatgataatgcagcaagaacagcagtactacctaaagctattttcttccaaatcttcatgactttttcctcctaaaaaatcaaaacaataaacaattcttaacaacagtagcttctgctacatatggttgtaagcttaattaataattatctgtactgcgttttcagtaccagattagttaacaatcgccttggtggaatctttatcaaagaagtgagctttgttaacatccaagcccatcttaaccttgtcacctggcttgtgataatcacgtgaatttacaatagcagtaaattcagtaccatcaacttcttggtgaagctgaatagttgcacccaaaagttctgaaacaacaacatttgattcaattactgaatctggccaggtttccataaatgcttcttctgagtgaatgtcttctggacgaataccaaagactaagtctttgtcgttgtagcctttttcttccagcagttttgccttaccttcaggaataccaatattcaagcctttgccatcagaaattcgaccgtccttgtagtgaacattgaagaaattcatttgtggggaaccaataaatccggcaacgaacatgttaactggcttgttgtaaacttcaagtggtgagccgatttgttcaactctaccaacagacattacaacaactctatcagccaaagtcatcgcttcagtctgatcgtgggtaacataaatagttgtagtacccaagtcttggtgaagcttagcaatttcagtacgcattaccacacgcaatttagcatccaagtttgataaaggttcatccatcaagaagataggtgccgcacgaacgattgcacgtcctaatgcaacacgctgtctttgaccaccggacaaagcacctggcttcttatccaagtactcttcaaggcctaacatcttagctgcttttttaaccttttgatcaatttcatctttaggcgtgtgacgcaactttaaaccgaaggccatgttgtcataaatggtcatgtgtggatataatgcgtagttctggaaaaccatcgcaatgtgtctgtcctttggagcaacatcgttcattactttatgatcgatttctaaggtacccttactgatgtcttccaaaccagcaaccattctcaaagtagttgacttaccacagccagatggaccaacgaaaacgatgaattccttatccttgatatgtaagtcaaagtcgttaacagaatatctgtcgttacctgcatattttttgtaaatatggtttaaatcaacctcaaccattgtttcccctactctctttaattatttttcattaaaaactttttcaatttcactcaatttcaactcagcagttgttggaacgatgtaatcagcttctttcaaaagctccttatcaccaattcctacggcaaattgacctgcagccttgattgcttcgactccagctttggcatcttcaaaactgattacttcatcagcctttaaccctgcaatttcttgcgctttgatgtaaatttcaggatctggcttaccatgatgaagtgttgctggatcaacaatgccatcaaattcatccataatacctaatctagttaaaatcttaggagcattcttagaagcagaagcaattaccatctttaagttttgcttcttagcatctgccaataactcagggatcccaggcaaaatgtcctttggcgtcattgtttctacttgttcaacaaatttagcgttcttttcagctgcgaacttttctttttctgcttcagtatatttgtcttcttgaccgccatattgcaagatcaagtttaatgaatccattcttgaaataccgcgtaagctatcgagctgagaatcagtaagtgtaatgcctaattctttagctaaattattccaagcagtcaaatgaaacttagctgaattagttaaaacaccatctaaatcaaacaataaacctttaagcattttgcgtttcaccttctttaagagtaagtttttggtctttaactacaacatctaaatcgtcacctttaagcaaggtaagttttgtttcattatgatcgacataaacttcgattaagcgaccacggtagttaatcttaaagccgtagtgatcccacttgtctggtacaaatgggttaaatttcaattgatcatgatcataacgcatccctgcaaaaccttgaacaattgctaaccatgaaccactcattgaagtgatgtgcaaaccatcaactgtatcgttgttgtagttatcaaggtcaaggcgagcagttctttcgtataattcgaccgccttcttttgcttgccaagttcagcagctaagattgagtggatacatggagaaagtgaactttcatgaacagtcattggttcgtagaagtcgtagtttctttccttttgttctttagtgtattgatcattcaagaagtagattccttgtaaaacatcggcttgcttgatgaatggtgaacgaaggatcttgtcccatgaccagtgttggttgattggacgctgatcttcaatttcgcttactggacgaaggttcttgtcaaggtagtcatcttgttgtaagaagatgccacgttccttgtcttctggtaagtaaatcttgtcaacgatgtcttgccacttcttcttttcttcatcagtaacattaaccctggcttgagcttccttagttgctaatggcaaacgctccaaagtgtacttaagtagccatcttgccatcgtactagtgaaccagttgttgttaacgttgttttcgtattcgtttggaccggttacgccatgcataacgtacttgttacgccacttggaccagtggactctagctgcccagaatcttgctgttccaaccaagacatccattccttcatccttaacgtatgaatcatcgccagtgtatgacgtatattgcttaatcgcaaatggaatatcagcattacggtgaatttcttcaaaggtgatttcccattcattgtgacattcaatcccgttgaaggtaaccattgggaacaatgcacctggtaagccttgttctttagcgttatggtatgcgcctggcaattgatcgtgacggtattgtaaaagtgcccgagtaacactaggatcagtaacacataagtacattggaacaatgtaagcttcagtatcccagtaagtagcaccaccgtatttttcaccggtaaaacctttaggaccaacgttaagacgttcatcttcaccgtaataagtcatgaataattgacaaatgttaaagcggataccttgttgagcggcatcatcaccagcaattacaacatctgatttgtcccagcgcttttgccaaacggcttcatgatcagctaagttttcttcaaaactcttagcttgaagcttggtcatcaattcagctgccttagcatcttgatcatctggtttgacgtcacgactagtaacaacaatgacatctttttcaagatcgtagctttcgccttcatttaactcaactgaaagcttttcatgaagttgggctgcttcagttgaaacatcacccttaactacttcaccattatgacgaagactttgcttaaggaggactgtaaattgtggaaccttgtatgggttagccttagtttcaaccttaatagttcttgcttcagcattttcacctaaaggcatccagaattttgcatcgtagttactgtcttcgttaacaacagttccatcaagtgctgcatcaaagtcgattttagctttaccacttaaaacggtagccttaactttaattaaagctgcttcttttaaggtaatatgtaaaaacctttcgaattcgaatttaaccttagtatccttaccttcataagtaaaacttctagtcagaagaccttggtgcatatcaagtgctaagtagaaatcactaaacttaactttagctaagtcaagtttttcaccattaatcgtaattcccatgttgatgaaacttggtgagttaggaaccttaccaaagtactttggatatccgttcttccaccaaccaacacgcgtcttatcagggaaccaaacaccagcaaggtaagtaccttgtaagctgtcacctgaatagccttcttcaaagtttcctctcatacccatgtaatcgttgccgattgcagtcatactttcttgcaatcttttatcttttggttcgaacttatgggtaacgaccttccaaggatcaatttcaaaaattcgtttcatatattctatctcccgtaatattcgaggttctctcttgtttacgctttcattatcctttagttgaaagcggtttacaatattaaatctgctgttaccgttatcaggattagttaatagaaaaagaaggtagatcttaatctgccttcttttttgcttattaaaagtaacttttaatgaacactcactacaaagccttttggtgccaattgattattctcataatcttgactaaacgtgttctcacaattgatctctactggatgatcggtcgtgttaaagtatgctttaattctttcattcccctcacgatcgacctcaattaacccattctctgttacgtgtaacttaattcgacctttaccgaaagtttcatcatgttgcaaacgaaagtcaatcaattgatgaactcgttgccaaaccgggccgtcttcttttgcccaatccattggtttacgacaatcaggatcgttgccaccagtcatacccatttcagttccataataaatgcatggactacccttttgcataaattcaaaagctaaggcttgcaaagccaaatcttggtctccattagctactgtcaaaattcgggctgtatcgtgtgaatcaagcatgttcatcatggctgcattggtagcatcccgatatttcatcaactggtctgtcaaacgactagttaattcttgtgctgacaacttgtgcttaaagaagtgatcctcaatttgcaaagtatatggataattcattacgccagtaaactcatcaccgttaagccatggacgagctgagtgccaaacttcacctacaatataaaaatctgatttaatatcagtaacgaccttgtggaatttcttccagaagtggtggtcaacttcgttagccacatctagccgccaagcatcaatatcgaagtattttacccaataagtggcaatttctaataagaaatcctgtacttctggattagctgtgttcaactttggcatatgcttttcaaaggcaaaagtatcgaacttaggactaccctcaccctttaatggatcgcggtaaggttcaactggatattcattaatgtggaaccaactagcaaaacgagaacttggaccatttttaacaacatcttgccattgcattgattgatcacccaggtggttgaaaaccgcgtccagcatgaccttcattccgcgggcatgagcttcattaacaactttcgcaaataaatccttgtcgccgaatgccggatcaacttgcaaatagtcaatcgtatcatatttatggttagaactggctttaaaaataggacagaaataaaggccattaacacccagtttcttcaagtaatctagatggtcaagcacgccttgcaggtcaccaccatagaagtcttcgcggccaggatgatcctccggattccacgctttaaccccttggggatcattagacttatcaccgtttgcaaaacgttctggaaagatttggtaccaaacagtatgcttaacccattctggcgttttcaccatatcaatttcatggcaatatggcactttgaaataagaaccatcttccataatggccttgtctacatcactgctaattgcacgatcacctacaactacactagtgccatcactgccaattacttcaaaggtatacttcaaacgatgatatggtgcttcaagcgtaatgccccaatgatcttcacactgccctacgccaattttttccatctcacatgttttagcctgttcaagtggcaaataattatcgcagtagtgaacaattacttttttaacgtcatttttagcactgtgaaaacgcacgcgaacatgacttggatcaactacaaaactatcttcactttcagttcggtgtcttaaagctgctaattgcatatattaattctcctttttcaacacaacacctgcataaggcatcaaagttaatttttcattagttaattgatattctcccgcttttagtgttgcaacagtataaccggctggtatttcaacagttgtcttttgatcactcaatgaaacagctacaatggcactttcatcatgtaaatcacgttgataaacatagctattcttatccgttgaaatcatataatacgttccagtctggaataaggcttcttttttgagttccagcagtttttggtaaaaattaaacatgctggtggtatcgttaatctcgttagctacgcaagcatcatcctgtttaatacctgttatccatggtttaacttcactaaaaccatggttctcagttgcatcccacggcattggaccacgggccggcaatttatgtgtttcactagccatagctaaggccgcatctttgctcaaaactttttctgcatcctttaaccatggcgctacaatttgatcttcgaattgatctgcactagtgaaatgtagattctttaaccctaattcttcaccgtaataaattactggaattccgcgttgcaaatacatcaacatcgccaagctcttagcctgagtttgtgtcttagctacgcgtgtagctaaacgagccatatcatgattattccaataaagagtaggctgcgatacgcctgctaatgtttgttgccaaactacttgattttgtttaaaggcagtcaaatctaatttcttaggctgatattgctctgaaaaacgttgatcacagttagaatcatcatcggtaaagtaccggaaggtaatcacactatccattaagtgattgcgcttagtcgtgtaatcaacagccaagttaacgctagcacttgcagcttcacctaataaaagcgtatctggataatcctgcttaatctgctcacagaaaggccgcatccattcctgcacctgtggtaagttagcgaaaaatggttccgcaacgattggcttgtttatgtccccatctccagttggataattttgtcgcaaatccgccttgccaatatggataaaagcgtctaaacgcaaaccatcaattcccttttttagccaatattcagctacctcaagcatggcgtgacgaacttcaggattcttccagtttaaatcaggcattcgcttatcaaataagtgaaagtatgattgaccggttccagctggatctggctcccaaacgctgccaccaaagaatgacccccaattgttcggccgcttgccgtcatgaccagcaaaaatatagtagtcacgatataggctgtcaggattcttgattgcgtcttggaaccaaggatgttgatcagatgtgtgattcaagacaaaatccatgatgaggtgaattcctgccttgtgcagatccttgattaagttctccatatcttccattgttcccatgtgtggatcgatggcgaagtaatttgaaacgtcgtagccgttgtccacctgtggtgaaacaaacactgggttcagccaaacggcgtttacgcctagatttttcaagtaagggatgcgcttacgaataccgttaaggtcaccgaggccatcgccattgctatcttgaaaagacttaggataaatttgatatataattgcgtgatcgtaccaatgtgccataattaatttcctccacgcatagtgtaacggattaaagaaaccgttttcaacaccatatctactgttatcgatatcaaaaaagcacaactcgcttttgagttgtgccttttcttctattcaattactaacttttagttgtgcttacgtttccgatcaacaccaaagcctaaaagacctgcaattgaagctaatgctaaaccaataatagatgctctgttttgtttttcaccagtttgtggtaatgtcttggcattcttttcagcttgaacagcagtattattactgtttgcgcgcttaccatgaacattgctattgtagctgtgattttcactattcaatcctgcggcctgattattccctgaattatgcttagtctcggtccgaatattttgaccattatttttggctttatgatgatctgctttcttacccgaattatcatcttttccaggtgtcttatcagttggtttattatctgaaggtgtagtattacctccattatcagtcttaacaactggaacagtgattgatgaacttactgaagctgaggttggagcattgtaaccatctttgatcttatatccagctggcacaccgtttttaatggcatttgaaggatcaatagttgtaccttcagtacctggaatagtggttctgccaacttcattaccattttcatcacggtagataatggttacttggccttgttgtggagtaggaggcgtgatttcaccgccaccgtttttagtataagtaatagttacaacagcatccttagtatctgcagttggagttacttcagcaacactatcttgacttggagtaaatccagtaaaggctggagcagtaaaggctggccaagtgctggttgcgtccttgtcaatgataaacttatcgttttcaactttacctaattgccagtcaccgtaaactgttttgacatttggatcagttgaaacagtcttggtgcgaccgaaccatacaacttgagtagaagtatcagtcttacctgttacaggattcttaacgttgattgtacgagttggatgagcgtacatatcactgttttcgcctggcttgtttggattgattgttgggtcggttggctcagtagtcttagtgtaagcaactgttacattagcatttggagtgtcagcattgaccgtctttgcatcaacctttgttgcttcatgcccattaaccgtggacttgtaaccgtcaactggggtgacatcatattcttgccaactaccttcagaggcaccagttgacttccaagaattattatccttagtagcaactgtccattctgtccaagtaatattaccatcttgatccttggtgccagcattttggccttcaccaccacggacaaagtgaacattttgggtaatgatgtcggtagtaccatcagtcttataaatcgtgattgtccgagtgacatccttgttcatatctttgtcggatggattgtatggaactggggtgatgttgtcagactttaagtaagtgatatgaacagcagcaccatttactggttgaccattgttaagtgccgaagcgctagaaacagttgtagtcttagttccattaacatatgaatcataatctgaaatttgtggtgcattcattgagacaaattctggttgaccacctaaaacaaacttgtggttttggatagtgcctgcctgccaattacctgtacccgtaacttcaccagttaccaagtcttcaataccattgcggccaaattctactgattgagtgtcaatcttcttttcagcttcacccggtttagtttggtaaatatcacgagttactgtcttgaacatgtccttgtacttaggatcagttggatttacgcctggagtggttggagtgatgtccttagtaccatgttcaacaagaacttcaattgcacttggagcagtagtgttaactgtttcagctgatggataagtgtaactctttgaaattacccatttttctggaacattactatcaattgtattcttttgagcttctgcacttacaattgctggagtagttgaagtaaattgtcccttaattgcatccttagctgtaaaaatcacattacctttcgcatccttataaacaatgctttgagtaaagttttcaggtgttggagttgcagcttcaacattaattgttgcaggaacatcaagataagtaccatcactaaagttaattcttacagtacccttaacgccatttgcaatattcttagttgaaggctggccattttcagcccaggtcatagtgaatgtcttggcagaatcattggcttgtgctgaatcagatgaattagtgccaccccagccattttcaagactattaacattaatcaaagtcttaaattgatcttgacttaagttagaaatattttgattttgcttgaaagttaatgactgattagtagttgaaccatagaagttgaagtaagtgttcatccaactgtcttgagtagataaaccaatgtagccgaataaatcactgtcatcaaagctatagtttacacgccacttagagttacctggtaggctttcaccagatgaagtttgttccttagagttaggatttgctggatcatagagaatatcaccggtaccatttgtaatatcccaattgctatttggagttaagataccattacctgctttgacccagctatacttaataacatttgcatcaaagctatctgacggatcttgggcattcacatacttatcaccttgtaagttataagtagtaactgtcttgtagtcacttgctgcactacccttaccatcccagtcagttctgtagacaatttgttgaatcttagcgatattaggatcaagttcatgactatcagtggttctgtgaactgaaatagttggtgtgatgaagctcgtcatactttgattgccatagtaggtatgatgctctggatcattaccagttatcataactggagcagtaaccgtttgtgtatccttacctggaacactaactgtaactggaatcttgtagaaccctggtgttgcgtcttgccctggcttcaaagtaatcgtaccagtagttgaatctactgttgcccaagttggaacgttatcacctgctacaaatttagtaccatcaggctttggtacaccatttgttgtaacaactggatcagatgctgtgctccctttttcaacagtaactgtcttataacttggactatattcacctgctggcacagcattaattgcaccatctttggtttgaacgtctaagtaagttgggttaccttgagcatccttatcagtaaaggtaagtctaatagttgcctgagtatcaccagcctttggtgcacttgcccatgaagcagtgtactgaataccggcattatctaagttaaaagtatcaactaaatcattcttttgagcgtcggttaaatcttgacctacagtaaccttaaccgggttagttacatccttagcagtagcaccagcagctttaatcgtcattggattactgtcaacagtagtgtcaccaactttaactgatacagtaccagttaagtcttcacttgcagatggagtagttacaacagttgttggagcatcgcccttccaagtaatgattgcactagtcttatcaactggcgtgctggttaccttaccatcttcaccaacagtgtattgattaattgcactaactgcttgacctgcagtcaaattcattgaattatctgtagtttcatgagctttatcaaatgcacttggagcagttacaacttctagggcaccagtcttagtggggtcagttggatctggaatgatcttgccagtgtgagtagcattgccaacataaactggtacgtgaactgtatccttagtagtatctggatacgttacaacaactggaattgtagtcaagccagttggcgtttcagtcgttggggcaattgttaaccaaccagtattaggatctactgtagcaaatggtgtgttatcaccaacaattttatacttagtaccttctggagccttgctacctgggttgattgttacagcactgccttgtggagttgattcaggatatgaaggatcttctgacttagattcaccttgttttacgttcatcggatcatatgaaggttggtaaacatcagcatcagggttagtgatatttaatggaatattagcaaaatcaacggtaccgtcttggtaggttacctttgcccaagctgacttatcgctagtcttcaaattaccagttgggttagttggagcatcttgaccgctcattaaatcttgccattccgttgcgtcagtagctgcattgtaccaatctacatttttaatagcagaaagatctggtgttatggttccatcgctagtccgtaacccagaaataccgtccttggcagttaagtcatttaaggtttgtttagtattaccatcaatagtcttgactactggttgatattgaccagaatcagttggcttagctacttcttctaaagaactacccattgcaactctttgtggagtccaccagttgaagttattcaagagtcggtttaagtatggagtttcatattttacaccatcagctggttgaccttgagtaactgttccatcaataaactgaaaactattaaacccagcttggttttgagcaagatttacttgaccgtttgagtgtaaaaatttaatttcaccattcttattttgtcctagagtgttgccggcttgagtaaagccagaaattgcattatcaccccagttgttttgagtttcaatattattgagataccagtaatcagatgcacctgtgcctttatttccttcatcccattgagcaaatggcaatttaccacctgcactagtaatagttacattattatttttattttcaagacgaagtaaagtacctgtttgatttccggtacgctggaaatttacatacttagggttggtaatagtaacatggttatagctatcaccagttccaccaccccacatagttaccaagccatatttaggagtattagtgaagaaccctttcgtaactgaatttagaactggctgagcattatcttgtaagtcaagcgtcgcaccttcatggacattcaaatcccacttagagcttgaaccactgcctgaaccaaatgagattaatggtgtagtagattgattgttatcaccagtacgaacaattattaatttaccttgattatctaaaacattggaatcagcattagtaatattagcagcaaaaccaacacctaatgaaataggagcaaagtggtaaccatcataattagttccaccattggcaccactaccatcattactttgtttagtattgatgttaacaacaccagttttgccaatgtttaagttaccagcccaaatagccattgagtgaccatcagccatgttggcatttaaattaccgtcaacttggacagtaccagtaatagcgctgttgacaagcatccctttaacatctttagattggccatttaaggttacggttgcaccttgttgaacatcaattgctggagcagtatcatttgtttcatcttcaactttggcccgcaaaatattgccaccagcgttttgatcgttgttagtcttagctgaacttacgttaaagatagtgttagaaccatccgcaaaaataatgtgtgcagctgaaacagcacttgaataattagaaacttgattccctgctacattaacggcttcacaagtgatattgctattacccttgaaggttaccgtagtatacggattatcacctatttgttgagccatcgtggtgttataaaaagcaccatttttaacatcagcagttacattttcaaatgtaaccttgttgttagctaaaagatcagttcttatgtcgtttccacccatgtaaattgggctaaaggcaccaccataactagaccatgaattatcataaccatcagcgttaatggttaaattcttgaaagcaatatcccaaggattactatctttttgattgttagtagtaaagctaagataattagcaccaaagttaatagcgtgaccttgaccatcaatatctaatcctccagaaatatttgaaccagttaagttcatctttccagagttaactagtggttgcggacgattaataccgttaacatttgtacccttattagcgacagtaatgtcactagttaatttaattgtaccgatattatagtcgtttaaagcattaactaatccttgccagtccgctacttcttgtgattgagtaccacgtaaattttgttgagtggtagctgcaacttctctaggttgtgcagctaaatttgctccaagctcttttgcaacttcatctttggtcttcttagcactgatattattgtcttgctcatttccaagtgataaaacattaaccttaccacgcatggtgctagttaaatcgttttagttaataaaaaagtccaatcttgttagactcgacttgtaaatagtaataatagaaaagagtctgatctgattgaactgccttaagcttaagcgttttagccaccatttacaagttagttttaaagatttagtgataatttgtcggcactggtatcgtttgtatgcaccggctgagtttactcatcagcgaaatattgatcaaattaaaactacggacagtctgattttggctttacttatctggcaagctaagacaggaattgaatcacaaagaagattctgtgaatgtttcaattgtttatcacactcacgttttaatcggcgttcacgtcagctattgcaattgatttatcagatacggcaagaaatgaataaaaaggttgacctgaatggacatttcttgatcattgacagctttccggtacctgtttgccaaccaattcgcaactatcgtgctaaaatttttcgcggttatgccaacattggttataaggccaccaagaaaatttacttctatggtttcaaagttcatgccattgttagcgatgacggttccattcttgattatgtcgtaacaaaagcatcagttcatgatgccaaggagacagttgaactgctggaaaatgcccatccatctaattactatcttcttggcgacgaaggctatttaggcaaagaactgcatcaacagctaaaacaaatgggttatgaactttggacaccatatcgtaaaaatatgacaggagctaaaaagcacaatgatcatcaattgatggctattcgcagaacaattgaaagcgacttttcgcttctgacctattacaatgccgagaacaatcgagcacgtagtctgataggctttcaaagccggttggaaattgcaattttagcttataatttggcttattgtctagaaagatttaactagcaccacgcgtataattcttatgtttatggacagatcgcgtatttaactaaccgtgttatcgaggaagttcacgaaaaagagaaaattatttctgaaatgcaacacgaagcggaagggttgtctgaatataatctactcttcactatccctgaattcggtgttcgaactgttacttctttgatcggtgaattaggagatattcgtcttttccatagtagtaatgctcttaatgcctatatcaggattgatcttagacattattatgaatcaggtaactttgttgccactgatcatattagtaaacgtggtgatgcgattgcacgtaaaattctttttaaatccatccaaaacattgccgtggcaagtcattttcatcctaatcatattaatgatttctatcagaaaaggaaaagacaatcttctcagccagaaactaagaaaattgccattgccgcgatacaccgtcttctcagaacgatttatcatcttgtaaaatataatcaaccctataattatcaaatagctaaagtataatttaagattgattattactattattgtgcaacccatgaaaaataaatctagttcatgagcttgttttgttatactttaaatttaactttgagccattttaattatttaattaacttttctatccagctaaattccaaggaattcctttaatatccttgactattcgtagaaaaccaaaataagcactgatgttaaattcatcagtacttacaattgtagagtccctttgttcaacccgtattgataacgactgcttacaataataaaattaagaccactagaataacagcttatggttttcgcaactttgatcattcccgtatccgaagtctactagctctcaaatctcatggtaaaaactaagctaaaagaaaaggtcagctcaagcagcttcgctacttaaactaacctcatcaaaatacctcatcagtactgacaaaggggtaaaattgtagagctaatttgattacttgcgcttcttgtttacagcagcaaggccaaacattcccaataaggtggaggcacctaagcccattaatgttaagctattgtcattaccagtttgtggtagttggttatccttagctgtcgttggttgagacgtaatcgtcttcccagtttgcatgttaggaacattaccttctagtttgccagtaacagcatttccattaggagtagtgtttgtaggcgtattagtagctggtgttccttgtccttgatgatcattagttgttggttgaccgccattagttgggatcaaccaacaactaatgatttgattagggttaccatccttgaaggtgtaagatgttggaacactttcaccaggaactaattgataaccatcaggaatgtgaatattaactggaactgtctgaccagacttgccaggattgtccggaagcttatcgcttggtgtctttggatcagttgttgttgtctctggcgttttgggatcagttggatctgtgtccttagtgtaaacaaaagttgtggtgtattggtatacagtatactggccactcgttactccaagagtacgaacaagacgataacctttaattttcttaggttggacttgccatggaccatttgcataccagcctttttgcggattaaccccattatttttttggttaggattatctaggttgaacgcaagcgtatcattattcctaagcacatttccttgctcatcaatgtacctcacagttactggtttgtttggtagcaagtaaacatgtatccccttagcgtaccaattgaaataatcagaattaagatatgtccctgtacttcctatataggagtaaccttgtttttcgtaatggctaatctcctcactcatttttttctcataattaccattgtttaggtcaatccttttgccatagctaccagcaatcgtaaagaatttgtacggtagatttgtttcttctggaacaagtaacaattcagtcctattactatcagaattattttttataaccttcttatacttgaaagttaaataaacatagttaggatcagctaacgaatttcgagtttgaccagtgattttaccctttaaaacaggttcagaaactaatttatatccaggaatattaatggctgcggcttcatagcgtgatgcatccggtgctttcttatcaccagcacggtgttgtggagattcaggggccatccagaaactatctagaacgattgatgctaaaatatgcccgttatctacatcaacatactctactttgattggtgacaatgatgcgtaatctaaattaatgttaatgtcttgcgtagtaatacctttcttaaggcaggcattaccttgtttatcaaaatagaaatacttattcaaaacttctgaattcattaatttataaccggccacagtaaatttttgatccacactatcccctggtcgaattgtggtctgcttgaaaggttgtttgaatacataatgaccattactaatcacttgaattggcttatgtagggtgacatcgcgaaaattcatagtaatgttgtacttactgggcagtggttgttttgctgttgttttatttggaactaatgttgatgaagtttgatgaccaaccgtatttgattcgtcgctaatccgaatattgcttgaatgggcactaacttgtggatcagtcacttgagtcgtggatgtattttgagcagcaactgtcgtattatctgccttggcattaccactaataatgaaggttaagcccaacaacccaacaaggacagatgccgttccaactgttaatttcttaatggcaaatcgttgtcgttttgctacttgttgcttatgtaatttgtccaaattttataccctctttctaagacacaatttattatatactacgcgtggtgctagttaaatcgttttagttaataaaaaagtccaatcggactagactcaagttgtagtatcaaaaagaaaagagtctgatctgattgaactgccttaagcttaagcgttttagccaccatttacaagttagttttaaagatttagtgataatttgtcggcactggtatcgtttgtatgcaccggctgagtttactcatcggcgaaatattgatcaaattaaaactacggacagtctgattttggctttacttatctggcaagctaagacaggaattgaatcacaaagaagattctgtgaatgtttcaattgtttatcacactcacgttttaatcgacgttcacgtcagctattgcaattgatttatcagatacggcaagaaatgaataaaaaggttgacctgaatggacagttcttgatcattgacagctttccggtacctgtttgccaaccaattcgcaactatcgtgctaaaatttttcgcggttatgccaacattggttataaggccaccaagaaaatttacttctatggtttcaaagttcatgtcattgttagcgatgacggttacattcttgattatgtcgtaacaaaagcatcagttcatgatgccagggagacagttgaactgatggaaaatacccatccatctaattactatcttcttggcgacgaaggctatttaggcaaagaactgcatcaacagctaaaacaaatgggttatgaactttggacaccatatcgtaaaaatatgacaggagctaaaaagcacaatgatcatcaattgatggctattcgcagaacaattgaaagcgacttttcgcttctgacctattacaatgccgagaacaatcgagcacgtagtctgataggctttcaaagccggttggaaattgcaattttagcttataatttggcttattgtctagaaagatttaactagcaccacgcgttatatactatatactgaaaattgaaagcaccaaaatcaaggaaactgtcaaatcttttgtgtaaatagttctttctcgtaaattgattttttaattatttatttaatcaaagtaggattctaaggtgtcctgaacctgaccaaagcctttatgaattcgattgaaataacggtcattgtagctcattgcctgaataccaataaaagcatcaagcgactgttcagttggaaactctgccttaggcttagctttgcgcttgatcacattgttaaatgattcaatcatgttagtcgaataaattgaagctctgatctgcttgggatagttataaaagaccagcagatctggttctatgtctttcaagcttctgataacatggctgtaaaccttgccccatttggtatagaagtcatgcaggacagctgtggcttcttctttgtttgtctgttgatgcacctgtttgaattcgttcatgatcttttcacgatcgtcgacgcgtactttagcgcagatattgcgcatgacatgaaccaaacagcgttgaaaatgagctttaggataagtcctggccaaggctgttttcatgccaacaacaccatcagaaagaaagagttcaacttgcttcaagcctctggacttcatgttttgaagcatctctgtccagacttcaatgttctcactaggagcaatgcagtagtcaatgacttccttatgtccattaggtttaatgccaatggcaatatagactgcttcacgctcaaacgtttctcggcgcaaaggaaggtatgtcgcatccaaatagacgcagaaaaacttgtcgcttagcttgcgtttgtggtaagcctcaacctttggaatcatctgcttggaaatatttgatacctgagctggactgtaatggctgccatacatcttttcaattagatcggctatttccctggtggtcacgcccttggagtaaagcttgataatcatgctttccaagatatccgagtgctgcttgtagtcaggcagcgtgtgctgatgaaattgaccgttgcgatcccgaggcacttgcacttcaattgggccaaattgcgtatcaactttgcggaaataagcaccatttctagagttgccagtattccagccatttctggcatagggatcatagcccagaaaggcagtcaattcagcttctagcaagttattaacagcctgttgtagttctttgcgcaataaatcatttattttgtctggattgaatagagcttgagcaaaatctttggtaaaatcattcatgaaggagttcttctttctgtatgtgttttttttgttcaaaccaatcatacgagaaaggaactcctttttctaatgtttaaagaaataaatttaaggaatcattcatccttacacaaactattttacagtctcaaatcaagctcaagtcctgtcactattgagctttcttagacgtaattagtttttatatgatctgtttcagtgcaatttgtatgaatcgtggcagttggttaataaagtcattgattacttcatctatcttttcaaaactattctgtttaagctcttttaattctgaaattaagtagaccaatgcatctacgaatctaatatcaggtaaggattcgttcattagatagaataaatctccgattgtcttatcatctgtattttgtctttcctgccaggtcaatagatcataagttattgctgtaactgcgatatagccacattggccatcatagctttgaacttgagatttatctaaagcaagatattgcttagacgtcttaaaatatgtttcaatttgccatctacgaccataaagttggatgatttcttcagggctaagctttgtctgagtagtagctaaaaccaaatacttgttcttgtttccacggttggagacaaagacgagctttaataaaaagctatgtccatgatattgagcctcaactatgcttgaataaagataatgtttctttttacggatgtttgaagcagccaaacgatcatacaagtctttaacgctatagcggcgatggcgataaatgtaataaatctttgaactcttcttgatcatgccaagtccatctaaaccgatcttctttaaaatccaaaacattcttggagaagaaaaccaagaatcgaataagacgtatttagcttctactcctaatcgtaaggcttgtctaatcaactctacagttacatcattcatctttctctgagcttgatttctccttttaccagaaattgaacgttcatcagcagtaatgggagcagctccaatcatatttttcttggttttggttgacatcaaggcaaagttaaccggcaagaaggtattgccatcgctccagcctaaagttaaaccacgatatccgttccaatactcatgcttgtcatggtcatagactttagctagcaattcggtctttttagaaaaagaccgagccatcagcgtatcgtcaacgataaaagcaagtcggcgtcttttatcgataaatggttttaagcagccaatgagccgggctgcaatcaagcataatagtttttgccagttgattcttccatcgttaagtacattgcgagcagttctaacggaaaaacgtttgtcatccttagctctgaataaagaaagccgagcaaaatgtactgacatcagccaagagataatcatggttaatgaaacggtggatttacgcttaaaattgacttgtttagttaacttagctagaccaattagattaataaatcccggatttaaaattgaagtgcaacactaagtgttaaacaaaaaggccatgaagacctaaacttgaagtgacgaaaaatcaagaaaggaagatcttcatgaccaattcaaattctagcatttctaagcactatcatcaattaaccagcgtacaacgtggacaaattcaagcaatgctggattccggcataacttcccgtactgttatcgctcaagaagttggctgccataagtcgacaatcagtcgcgaaatcaaacgcggaagcgtcctgcaaagagacagcagctatttattgtatgagcactattacgctgatactgcacagatttattatgagaagcgtcgcaaaaactgctatcagcgcaatccattgaagcattatgctgtctttttgagaatgctctccagacgctttaaagctaaatttgatgccaccagcatcgatgagttcgttggtgaattcaaaaggactatgccaggctacccttgtcccagcacaccaaccgtctatcgctatattgatcagggcttgctggacataagcaatattgatctgcctatgaagctcaaaagacgcaggaacaagcgtcatcacagccatggcggtcacgctttgcacaagaagcatcttggcaattccattgaacagcgtcctaaagagattgaagacagaaaagctccgctgcactgggaaggagatctggttaaaggcgtcagacgcaagaatcagcctgctttaatgactttgactgaaagaaccacacgctttgaagtagttatcaagattcctgactatcgggcaagcacatgccaaaggctgcttcaaaaggagattgacagacatcctgcctggtttaaatcaatcacgtttgacaatggctctgagtttgcggatatgaccaagatcaagggctgccagatttactttgctcacccatattctccatgggaaaggggcaccaatgagaactgcaatggtcttttgcgtcaattcttccctaagggcaagagcatgaaagacaagtcaaaagcttatgttcaacaggcaactgatgccattaaccacaaatatcgccgaatcctccaatatcacacagcagaggaactcttcaagcaatatatctcttcataacctaactgttgcacttaatttgacaattcaggtagattaataaatgaagaaattaaggatttagtatcattttctgtgtcgatttgttctatactgttcattgcgcaggatctcctttactttttaggtcgacacttaaagtataacgcagagagatcctgcgtttttatttttgataagaaaaagccaagaggcgcggggaaggagcgttaatcttagctttcaagtttcagaaataattttaaaagcagttaaaaagcacctctgagttatcagacgtgctcgttatcttttcgatttatctagttgattggcgccgaatcagcttcggtttaagcattacttcaccttgaggtgaacctgattgggcaatcttttgcagtagcattttagctaacatttcacccatttcaaaaattggttgtttaattgtcgttagctttggattagaaacttgatctaaaaagacaccatcaaaaccaataactccaaagtcttccggaattcgagcgccttcatcttgcaattgccgtacaacacccactgcaattcgatcactggcacagacgaaacaagtatcttttttaaattccttaaaatgttcatgaatcacatcttgcgcagcatgactatgattagaaacccgaaaaatttgtggtatcaactggtgttgttgcaaagtgttgatataaccagcttcacgtgaatattcaaatggctcttttaaatcaattccaataaagataatgtgcttatataaccggtctaaagcatattgagtagccatcttctctgctaactgattatcagaatcaacaaagtcatagccgcggtgattttcaccaaataaaacaaaaggcttatcgagtttatcaaataattcataatctttgtttcgcgccccggtaattaaatagccatctgcatgttccttttcaatttgattaggatccgtaactaattgcatcgcatactgcttagtatttaaaccacgagcaaaaccaaaaagcaagttcatatagtatggctcagtggtatcaatatcttctaaagtgacgaattttaccacgttagtccgattattaactaaagcctgtgcaattgaattgggatggtagtttagtttctccattgctttttctaccattgctcttaattctggcgttacttgctcaggatgattaatcactcttgataccgtcatttttgatacatttgcttctttagcaacatctgataaagtagtcatattattcctattctaagtacatctttctgaatcggtttaaatctttttggctaaagccaagctcttttttgaaaaatccatcaaaactgccccagccttggcgaatagtttccgtaattccacgaatagccggtccctctcccttggtaatattcattttagaaactaggctagcaatttcattatcatcggggaactgtttagccaaagcaaagtcatacaattcattggtcaatacgcgtggtgctagttaaatctttctagacaataagccaaattataagctaaaattgcaatttccaaccggctttgaaagcctatcagactacgtgctcgattgttctcggcattataataggtcagaagcgaaaagtcgctttcaattgttctgcgaatagccatcaattgatgatcattgtgctttttagctcctgtcatatttttacgatatggtgtccaaagttcataacccatttgttttagctgttgatgcagttctttgcctaaatagccttcgtcgccaagaagatagtaattagatggatgggcattttccagcagttcaactgtctccttggcatcatgaactgatgcttttgttacgacataatcaagaatggaaccgtcatcgctaacaatggcatgaactttgaaaccatagaagtaaattttcttggtggccttataaccaatgttggcataaccgcgaaaaattttagcacgatagttgcgaattggttggcaaacaggtaccggaaagctgtcaatgatcaagaaatgtccattcaggtcaacctttttattcatttcttgccgtatctgataaatcaattgcaatagctgacgtgaacgccgattaaaacgtgagtgtgataaacaattgaaacattcacagaatcttctttgtgattcaattcctgtcttagcttgccagataagtaaagccaaaatcagactgtccgtagttttaatttgatcaatatttcgccgatgagtaaactcagccggtgcatacaaacgataccagtgccgacaaattatcactaaatctttaaaactaacttgtaaatggtggctaaaacgcttaagcttaaggcagttcaatcagatcagactcttttctattattactatttacaagtcgagtctaacaagattggacttttttattaactaaaacgatttaactagcaccatgcgtattggtcaataaataatcacgcgaaatggtgtcatcatcaacacctaatgcggtcaaaattaacgccgaagtcatgcctgttctatctttgcccgcactacaatgataaactaacgcatcttcttcaggtaattcaatcaattccgcaaaaattttagcaaattcatgttggctatgtgaattaagcaaaacctgttggtaaatttgaccaagccaattgtcacccatatcaggaatatgatggacaaagcgatataacttgttatcgcctttattttgcttgcggttttcagaataaatatgtgcatcaacaaaacggacatttgaccaaagcttgtcaggcgctgaattttgttcatatttagagcgtaaatcaacatctacggtaattcggcgttcaactaacttttcttgatcttccttcgacaaggagctaagtgaatcagaacgatatattttgttccactttacatgttgacccttgtcattttggtagccgccgatgtctctgaaattcagcggtccatccaaagctaatattcgatcatgcttcatttttccttgcctttcctcattaaagtgttaataccgtacttttattatatcattatcagtcatgtgcaaataaccgagcggcacgaattgctctttgccaacctgaataaagtttttcacgttcaactgcactcattttcggctcaaaggcctgtccaatcgtaaaggtatgctttaactcgtcaatatttttccaatagccaacggcaaggccagctaaaaaggctgcacccatgctggttgtttccagcgttttagcgcgttcaatttcaatccctaaaatgtcagcctgaaactgcatcaggtaattgttgttgctagcaccgccatcaacacgtaaagcaggaatttcaatgcctgaatcttgttgcatcgtatcaacaacgtcacgggtttgataagctaatgactgcaaagttgctttaattatatccttgtcagtagttccacgtgtaacaccgaagattgaaccacgagtctccgcatcccaatatggtgcgcctaacccagtgaaggcagggacaacgtaaacctcgttctctgatgtcgactcaagcgctgcttgttcagagtctggcgcatgcttaatcaacttcatcgaatcgcgtagccattgaattgcactaccagccacaaagattgatccttctaaagcataagtaatcttaccattaatgccataaccaatggtcgttaacagattattgttagagtctgttggcttgtcccctgtgttcatcacaataaaggcaccggtgccatatgtgtttttcaccattcctggtttcaaagctagttgaccaaataaggctgcctgttggtcaccggccatcccagcaattggcacttgtccaccaaagaacatatatgacgctgtttcaccataaatctctgaattcgagcgcacctcaggcaacatttgcttaggaatattgagcaaatgcaaaatatcgtcatcccacttgagcgtgtgaatattaaacagcatggtccgtgaagcattagtgtaatcagtcacgtgtttagcaccatcagttaacttccaaactagccaactatcaatcgtgccaaaaagcaactttccctgttcagctttttcttgcgcgccaggtacatgatcaagaatccagcgaatcttagttgcactgaagtatgggtcaataattaagcctgttttttgacgaatttcattactatagccttctttttttaatttttcagctaattctgttgtctgccgtgactgccaaactattgcatgataaattggctcacctgtatccttgtcccaaacaacggtcgtttcacgttggttggtaatgccaattgcggcaatttgattaggccaaatgcccgaattaataaaagcattggcaattgttgtttggaccgccatccagattttattagcgtcatgttcaacccagccaggctctgggaaatattggtgaaattctttttgggcagaagcaacttcacgtccatcatggtcaaaaataattgctctagtagaggtggttccttcatcgattgctaaaatatatttttctgtcacagttattctcttttctacaaaagcgctttcttataatattactgtttttctgatgcagattctagcagttaatgtaatagatacggtataatttttataaggattttttaaggagggcattttaatggaaaaaaatcaaaaaattgcggtaacaattgcgggtaacgatagcgacggcagcgcaggcatgccagcggatctgcattcattctacgcccgcggtgtttatggcatggggctgatgacagccgctgttgctggcaataccaaaggaatttttgcccaacaaattatgtcacttgattttattcaaaagcaatttgatgtactaaacgatgatttcaagattaatgcgactaagacggggatgctcgccaacaaagaaattatcgactgtgttgccgataatcttaaaaaatatgacatgggtaaaatcgtgctggatccggtcatcgttactaagcatggcgctaccctgcttgacgacgatgcttatcaaactttcttagacaaattattgccgctagctgatgtgattacgcctaacttttacgaacaaaaaaaactgaccggcttagaattaaataataaagaagaaattcacgccggggctaaaaaattgcaagcgatgggcgctaaaaatgttctgatgaaagggcgccacgattcagatacgcaaactacagtaaccgatatcttgttaactgaggacggtgaattccacgaatttactaagccattctttaaaaccgaccgcgtaaacggcactggtgatactttatccgccgtgattgcggcagaattagccaagggcaagtcagtgattgacgctgtaaaaattggtaaggactttacctatgacgctatttctcacccaattgatgttggctcaaaatggggcccaattaatcatttggctgcacaagaagaaaacgaataactataaaaaataccgaagctcagatttgaaacttcggtattttcgtgtctattttatcttctttaggcctactatttttcctgaatctagaacacttaccttcgttaattggttattattgtacttatatgatgtaccttcatccgaaagacgtcttgtgggtggtcatttgaccactctttttttacgcaaaaaaacagcaatgaaatcaatcattgctgctaatttgtttactttttctcaattacaaaataatatcctgctgtcaaaatttggacaattccttcaagtgcaatcgcccaatctgcaccgaaatgcgctacgatcagtccacctaaaaatgacccaatcggaatcatcgacgacaaaatagaatcgttaattgtttctactctacctaaaatatgtgggctaaaactctcttgcaccaacacttcaaagttaatattcatcatcacgatccataattcggacgtaaaaaacaaaatcaacaataaaagcggcatccctttgggaacaactggttcaaggacaattgctaaacctgataacgtgagacaaatgacgactaacctttcaattttgcttttatcaaaagttagtcgctgtaccagtacactgccaactaatccacctattgatgaagctaattctaagccaccataactaattgccgatttagtcaaatgttcagtcgcaaaatacggcaaacccacagatgaaatgccgtaaaaaagattagtcactgcaaaaggcatgatcaaccgtgctatcttgtcttcttgtttcaaattttgccagcctttaagcaaatcttgcccataattttctgtgaaatattcattcgacttatttggaagtaataatttcctaggcaatattagtcgtgtataaaaagctagggcgcttgcaaaaaatattgcagaaataattaccgtggagtcaaatgacatccaagtaatcaataacgttgccgctgcattcaaaaacaaatccagcgtcttataagtcatttggaaaacgccatttactttagttagcttcgcttttgaaacgatgactggcaaaattttttcttcagcaggataaatcaaagttgagccaatcgttgaaatgacgtatacccctagcaaaagccaaatcactaaatcgcgccacaacttaacttgaaacagcaacgtcgctataacgctggtcactatctgcattagagttacaagcgtaagcatctttttgatataaacacgatcaatcagcggcccgaagacgaacgacaacatttcaattgatgagtctgcaacaaagattaacgacaagataagcggcgaatgaaagcgtaccttgaaaaaccacaaaatcgccatataaaatagcgaatcggcgatattggttaacactcgtcctgctaataatcgtctgacattgacattttctttttcgattaagttaaacattttcccattccttttcacaacactattaatgccgctgaaagccagggaaaattactattcaattgtagttaaaactcccagaccttcagctaaaaatctgggttgagcctcaagtagcgtttgacgaatgaaagaaaataattcattcgcaaacttaaacctaaaatgtcacgcattttagtcctcgctttctgtgaaaattaagttaattatagcatggatagcgacttatcaataatagtcattctatccttatatttttcgtattttcattcaatttcaaatcatgacttatgataataaccaaattaacttgcgctatttcctgcaatagttttaatagatcactttgtaactcaggatagatatttgccaacggttcatctagtaaaaaacattgcgcgccagtttttaaaacagcagaatataactttactaactgtatttcacctgttgatagttcatttatctttctatctaaaatcttttcaattctaaattgtggcgaatcaaaaacttttgcaaaatacttgcttttataaacctgacttttatcagaatatgatcctaaatagtccctcactgaacaattaggaagtggtatatcttgaaataaacaacttatatttgattctctcagttttcttttattaattaaatcagcatctataccatttatggttatttttccttcctttttcggcgtgtataggccaattattgttctgagcaaagtagattttccaattccatttctgcccctcacaatataaaatcctggagtaacaaaattggcagaaaaatttgaggtgaataagggggttttttcatctaaataaatattaaaatcctgtacttgaatcaaatttattttagaaattatttttttaccatcttgttcattcttcatggttagtaaattgttgattctcatccacgctactttaaacgattcaaatttaaataagatagaaaaaatttcatcaacctgtcccaaaagttgattaaaatattgaaaaataattgaaaaggaaccgattgtcatcttgccggaaatcactgataaaccgccattaataaacaatactaattgaaaaataagttgcaaaacaatctcgctattagacatatgtcaactaccctagactgaagtctagggcttagtggctcgttagcttgcgctaaccagaacaccaacttgcttagatacggacttgacttaccagcaatagtcttttgactattgccgatagaggtcgtctaattaccaaagccttttgagtccgcgagttgctaacggactacagcctttctaggctgctttttttattttaggattctgccacttgcctaatcctttttctaagatgttcactgccgcattccaatcacgaatatggtgcgttcaacagattggacaagtccattcccgatctttaagcgttagtttcttataaccgttttgtcccataatactgccacaagcatgacagcgttgagtagtatatttaggatcaattgttagaaattctttgtcatatagatctgccttataagccagcatgttcaggaagctgcgccaaccaacatcagaaatagcttgagataaggcatgattctttaacaggtttctgcttcttagttcctcggtaactactaaatcgtggtttttgattagtgcagttgagagtacttgtaaaaagtcactacgctgtcttctaatcttgtcgtgcagtttagcaactattagacgctgtttttgatagttttttgctagccgcaaattgcgtccttcttttttagcccggcgctgccggcgagacaagacacgttgagcgtgagccagtttcttttgggttttgcggtaaaagcgtggattagcgaccattgatccgttagatgctgtcaagaaattatcaaggttgagatctattccaatttgactctgcgtcttaggcaaggctttaacaaaggcaatatcgctgcctaactgcattgataagtagaactgctcgtcagcggtctttttaatcgtgactgttccaatacgagttggaatatgattaagcaagcgctctttgattagttttctaaagccggcaatgcggacaattcccagcttaggcagtttaacgtgctgagcatcaataaacctagctgtcccgttatcaagaaaagcttctttttgcttaggatattgacagttggtctgatatgaccagtcgctgcgttttttatggaaagttgggattccatgaccaatcttacgatagttgttccaagctttctgatagttttgaatcgcattggcaagagcgagactatcaatttctttaacacgtaaaaagctataagcatcgcggatattcttaggcttagctaataacgagttattaatgactacttcttctgccagcttagtctcataattattaagaatagaaaagacaaaaggcattgcttgatattgtctaacagctaaatagtgcttagcatgataattgcttcgattgcgtcctacataagagttgtatacaaagcgttgcgcatcatagtttagtttaatgattttcttttgcttagaactaggataaaagcgaagcttaacgccaaagtgataggctaaactgctcattcttttcatgtgtttcacctccttctgtagattagatatttatattttacaggaaagccgaacatatgtctctatttttttgaataaaaaaagctgactgctaggtcagcttggccctatccatccccgcattaagatacggggatttccgggcattttcattaaattgagaagaaaatctcgcttagcaacgcctaaaagcgttcttttagtattgctccatctctcagtttcgattttctctcttcgattaccttttatttcaatatatctgcttaaccattcagtaaaaccagaaaagtactcattataagcttctttcaattttaaactaacttcaaaaatcttagatcgcaaaaataaatatatgagactatatgcaggtaacaggatcgctattaacaataaaaaaccagacccagccataaataaatatgtaaaaatcaaaattgaagaaagggcgattgaaataatttgatttattgtttggaataaaaaagtcaacacttcagtagtatcttcagtaattttatctgctgtttgaaccgaattcatctttgtaactgctagcgtatccttcacatacagttctttcattattacatcattaacttccatgtttatttctctaaatcttaaaatctgaattttgttcataaaatatgacaacaaaagtctgataagacttaaagtcgttattaatacaatactacgtacaaaagcagccctatcagccttatatactaaggaatttaacagtattccttctaagtaaacattaaaagtcaaaatgccagtactgataatattcattcctaatagaagccaatattcaattttatactttttatcaattttgctaaaaatcgtatgcatagtgtcacctaactctgactagcagtcaaaaatgttaaaatataatgaatataaaattagataaattttatattcttatttatcctatgtcaatactaaataaattgatttggttttactttcatgctgtatttgatattatgtagttactaactaccaaataactatctatcaactacagaaagagaaaaatatgactgaaaaagcagcaattaacatccgtgttaataaagaaactaagcaaaacgcagagaaagtattaaacaaactaggcatcccgatgtcagtcgcaattgatatgtacttacgacaaattgcattgactgacggcattccctttgatctatcttccaagaaaagaaaaaagaaaaatgatcacgaaacagcaatgatggtcgcagaagctacagctcaatatgaaatcgttaaatccaactgggaggataaattagctgagtttattcctgactggatgaacatgaataagatgactaaagaggagcttgaagcaaggttagctaagcatgcccaagatgcaagagatggtaaaagtgtcgagattagcaaaacttttagcgacctgaataaagaattaggaatttaaatttcatacaagaatatactgtcaaatcaagtcctaacgtatctgtagaacttaaagagatatatagctctatcttgcaattatctcgatctccaaaaactgctcgagattatgtaaaagatcttgaacaaactatgcaagcgttaaattattttccagaaagacatagaaaaactccttcaggaaaataccgacgagttaatttcaaaaaatacgctatattctactttatcgaaaacgatactgtacacattattgatgtcatactagcttcatcaagtacagtattcaaatattaatcctttgccccattctagctattaagctatactagacagaagaaattaaacaaattaagggacaataaaatgagcgataaattaattaaaattgcatacctctacgaagatttaatgaatacttacggtgactcaggcgatgttaaaatcttgagctttttgctaaagcgtgaaggctacgacactcaagtcgacaatatttcacttggcgatgacttcaatgcctttgactatgatttcgtcttcttcggcggtggtcaagactttgaacaaaccgttgtagccaaggatttaccacggcacaaagaaacacttgataaatacatcaacgatgacaaacctatgctctgcatttgtggtggttaccaactaatgggtagttactataagaccaactcaggtgtaacaattcctggcttagacattttgccacttcacactgtcttcaagagcgacaagcgaatgattggtgatacccgttacatgaccgaatggggcgaagttaaggcttttgaaaaccactctggtcaaacttacttcgacaacaaggacaagttgcatcccctcggcgacatgatcgaaggctacggcaacaacccacaagaccacgtcgaaggcctgcgctatcgcaactttattggttcatactcacatggtccactacttaaaaatactaatgtagctaatgccatcatgaaaatgattatcgcttggcaccaagaacgtgttagcgaagccgaaaaagtcacagaataaaaaagacccagtcagaatctctgactgggatttttcattatcaaattaatttaaaacacgtttagcagctgagggataaaagtaggcactgatagcctgctttctcaccccttgactaggagttgcagcgtgaacatattgtccatcaccaacataaataccaacatggtaaggagctgaggcagaaccccagaacaacaagtcgccttttttaagatgacttaatgatacgcgtttacctttagtaacttgaccataggtggttctaggtagtgtctttttagcagcctttttataaacgtattgagctaagcctgaacagtcaaaggctgaaggaccagtagccccataaacgtaactcttaccaacttgttctttagcaagttggactacggcgttacgtttttctgttttgctttgactagctgcttggacagtttgcgtttgaagtggaacattaatgaatgaaattcctgtaaaaaatactgacaaaactgtggcaaacttaactaaactacgtttaaaactcaatttatttctccttaacacttcttatctttcaatgttttctatattaccggagaaatattacagccttgttttaaaatgactactataaaattaagcaatgtaacaaaatctgctatttcttgtaaattttgcttaacttgaaaaacactataattttctatatgcttaatacattaatttaggagttttttattatgaataagatagatagttatgtacgccactttttaatactaatcgcactaattttagggctttcactcgtctcagaactgcgtgaaattattgcctatgactcatctacccttggtatcatctttttaactgctgcaattatttgtacttttgcttcaggaatcacattacaatttcataaactaaattggattacgatcattttaattctgattctttctacgattatgatcttattctggctcaaaacccacacttttggccttattgtcagcatttttatgatttacaatattattgtatttctggtttgtgctattaacctaatttttcaaaatgatgctgaatgattaaatcatatgcttaatcataggtaatacaatcccaattaccactaatccaccattaaacaaaaaacttattaatttcttttcaaaaaagtatttcttcataaaaaaagacctttctattatgaataatcaaatcttcgggctaaaattccgacaattacgaaaacaacaacatatcactttagccaaagcagcagctggtataacttcaagacagtctctaggtaactgggagactggcaaaggcgaattagcatttgagaaagttttactgctactaaaaaaaatcaacgtccagccaatagactttttagagagtagtataagtagttacctcaaacaaactacttcacaaatctctgcagcttatgttaacaaccaagttgataaattattgcattatgctaataagtatcttgacataagccatcgtaatcttacagacagagttagctttttacgagctgctgtggcatgcaattattacatggacctaacgagtatagatctaacaactagttctgataaactacggatcatctcccattttaataaaatcttgaatggagaagaaatctggaattttgaggatatttattttttaggaaatacacaaaatctgatgagtccacgtgacatttatagtttagcctattctttaaattattatcgtcaaaagcacaaaaacgataatagagaatggatcaatgccgtttataatactttgataaacgctgaatttgtacttataaaaacaaatattaaattggctactgatttagacttacttttaagacaaaagtgggatttaccagataattatgctttcgaaaaaattcgacaaaattttatgcatgaactgctaaaatatatttcaacccaagatgaaagtgcaataactcagcaacttcacattcttgaattagaacacctatctgatttaaaaactggttttgaaacagcatatgaacaagtaaataaaatatattttcaataaactctcctcctagttagtaatattatcttatttctaatattgttagcgctttttgccaatattttagcatttttctttttacaaatattagccatgatattttatattcgtaaactaattaagattttttgaggaggatataaagatgaaaaaatcaattaaattagttaatgtactttctgttagtgtactgactttaggacttgtagcacctgtaaccacagtttctgctgatactgctaattctgagaatatcgcagtaaaaacaaacaatgaatcaacacaaagtacagatacatctggcttagaaatctatgatcaatacgttcaagtaaatcctgaaaaaaatcaattcgaattatccaaattaggtgaaaaggttttaccaactactgtatcatcacagattcagagtcaattaaatgctaccaataaagaaattaaggctaataattttattattgaccctgaaaccaaagcaattgtaaaatactcaccttatattaactttgctgctagcgttagtggcgctgcgcgcttaagaagcggatgttatgttcgatggttctggtggggctttagattctactttacttcaaatgcagcagtaacttggtttagagggattttaggtggcgcttctagtggagccaccataggaaacttagtagctgctgcaacgggccatgctatggctgcaactacaatagaagcatttggtatgtacgctgatagtatgtctagagatttgtatgattataataaaaaacaccgtcgtagtaaagtatatatggatctgaatggtgtatttcaatattcatttcatacattctaaaacatttggagaaataacatggggattaaaactttagtatccgtcattttaatcattatagtcattgtactagcctgctcaccattttataaaaaatatcaattattctatttaaacaaagtaggctattgggatatcctaatccaattcctagtaattgcaggtatcaacttcttcatcggtttaaaatatggtctgggtgccctgtttttattgattgttcccgttccactagacattattttcttaatctcaatgatttattcttaccttaaaattagaaaaatgaaacgcaaatagctcttaaaaaacgaagcaaattattgcttcgttttttgattgatcttatttttcttctgtttcggcgttagattcaaagccatcgcagccacgacaaccaacactgatccgacccaatccatcggcatcattactaacccaaagaaaaggacagaaccaactgtagctgaaaatggttcaaaagcatctaataaacttacagttgatggaattacataccgcagcgcgtttgccataatttgaaatggaataatcgttccaattacaataactgccgcagtatacagccaaacttcaggcttattgggaactgcatgaaattgcggatcaattatcaacaaactgattccagcaaaaatcatcccccaacctgttactaccatactagaaacctttttaacaatgttaaccggaatcaaagtataagcagcctcaccaaaagcagacaaaacgccccaaaacagtgcaactggcgtaatggccaaatgattaaattgcccatgcgttgacaataaaaacactcctaaaaaagcacataacgccgctatgatatccaatctacgcataacttgcttgtgcgtgatagctaaatatcccaatacaaaaaatggcccaataaattgcaagattgtcgcaatcgaagcattagccacttgaatacacataaaataaaatagctgcactggcaataatccaaatatgccataggctataataaccaaaacattgtgcttatttttcaacgtagctattggtttttgctttaaaaatcctgaggcaattaataaaactgctcctgaaataatcaaccgaatttgtgttaaccacattggtgtaatcttcggactaatatcaaacaatcctttagcgaataatcctgacacaccccacattacagctgccattgctgctagaaatgtccacaatcttcgtgtttttgctggtaccatctcgttcacctttttctttctcattcacctaataattaaaccacaaaaataaggatacctactgggcatcctcaactttattgatgagtttttttaactttctttttcttaggtgaaatattcaaggccatagctgccagcacaactaaaatcgaaccaatccagtccattggggtcatcaccaaaccaaagcaaataactgaaccaacggttgcagaaaaaggctcaaaagcatctagcaaacttgccgttgatgccttgataaagcgcagcgaattagtcatcaattggaatggaatcagggttccaatcacaatcactgccaccacatctagccatatatgtggcgtattcggaatatgcggcatctgtgggtgcacaatcattaggcaaattcccgctgacagcaatccccaacctgtaacgactaaactagaaactcgcttcaacacactgattggaattaatgtattggtcgcaactccaacagctgaaagcaaaccccagaatagaacgctaggcgttaaagcaaagtgattaaaacgcccatgtgtcgccagcaatactacgccaataaaggcacagatggcagcaagcacatctattcgccgcattacttgcttatgcgttacagctaggtagcccattacaaaaaagggaccaacaaattgtaaaatcgtggcaatcgaagcattagcttgttgtactacaataaagtaaaacaattggactggtaataaaccaaaaatcccatatgcgataatcgtccacgcgtcatgcttatttttcattgtagcgattggcttttgctttaatacggcagctacaattaacaaaataatgcctgaagttaccattctaatctgtgatagccacattggtgtaatctcaggactagtattaaatagactcttagcaaatagacctgatattccccacattacgcaagctaatccagctaaaaaggcccacaggcgccgttgtttttgtgtaaccattctttttaatccccaacttttctaaaactaacatactctatcataacaaaaacgggctagcttgaactagtccgttaattttttattcatcgtttttcttaattgggtttctgctaggcattagctgcatgaatgtagcaacaataattaaaaagccaccaagcatgtccattgggccaaagtccgcatgaagcagtgaaactgacaggatcgttgcaatcagtggctcgagggctccaagcatccctaccgtacttggttcaatatactgcacactagataagtacattgtataagctaacaatgttccaccaataataatataaacaattacccaaacatcaactggtgcaagttttggcattggttgagtgaagtaaattggtaaaaaggcaatgcctgcaaccaacattgctgcgccgattactggaatcggcccatactttttgaataatttcccaggtaatactgtattaatcgcttcagaaaaagccgcaattaagccccagaaacaagcaagcggtgataaagcaagttgatcgaatctgccacctgtagccaagatgaaggttcccacaactgctaccacaattgaaatcgcatcaattcttcgtggccacatcttacttctcaatgaagaatatataattatgaaaactggcgctaaaaattgaatcaccgtcgctgtcggagcattgctgtacttgactgctacaaagtacgataattgtgagctccccattcctaagaaagcaaaaatgatcaacataatgattacttttttatcatgtagcattgccttgacttggtccaagtatttccaacaagcataaatcataagcagggcgcctgaaaaaagcaaacgcagacctacaagccaagcagtatttacattagtgctagaaaataaaaattcaaccgccgtacccgatgcaccccaaaaacaggcaccgacaacagctaaagtcaatcctttataacgctgattcacattcacacatcctttagattaatgtttttcattgtaacatgggctaaaggaaaagttcaatgcttctaaagttgatttaatctatataacgtataacctgacacgctagccaataagccgattgtaaaaagcaaccaagattctggatgaaaggcaattaaaacaagtgaaagaaagcctgctgctaaactagaattgcgttccattcgctttttgccaaaaagcagaccgcacataatgccaaacatagttagcacataaaatgagtcaactaacagtaacaaattctcaataattgctagatcacttggctttacttttacactcaaatcagtaaaaatctgagcacagccaaaaaataccatcacaaatgcagctaagatcgtgataaagctaatcgtacgaaaaactgacttcaccttttgagttggcgtttcatcgataaaggtttttaagaaaaactcgtgatctttttttgctactacagctctgcccgtcttcttgtcataccagttcaatagaccagaaccaattagcataatagcaatcacagcaaactggatgacaattaaacgcatgaaaattggaaaggcatagattaccgtcaataacaaaattactatatagatcagctctgcataaagaaagaaatgcagacgctgtttatttttgaaaatagtttggaatgtttttgaattaggatcttgcataagacttctccccactaaatcttattacgaaaactcaaccagaaatttgccccactgagaatcaagccaataacagtggctacttgcatgcttggctgcatgaaaagcaagatcagtgataaaacaacagttaaaacgctagacgcacgaattaatttacgatttccacctaaaataccgacctccacacaaaagagtaaaacaacatataggccatcaccaatcagccaaacattttcaaagagattggcaaaattaccggtaagcggcttagccaaaatgtcagtccaaagctgacgtgcaaaagcaatacttaaaccgatatttgcccaaaagagcaagaattcaaataagcgaagaaatacgtttttagtaaatctaatactagtcagtgtttcccagaatgtatcgtgttttttaatcactatccttcgatcaagaaaggcaccaattgaataataaatcagaattgcaatcccttgaaatgcaatcaaatgcataaaaactttaaagtcaaacatcaatgtgaatagtaaaactactacataagctaactcaaaatataatacacagcgactaaactttcgctcgctaagccagtgcttcaattctcttttattcatatgatcactaatattgccattcatattttcactctcttttaataattatctaattatgtaaaaattgtataatgatttcaaaattttgtctagtccttttataattgatttagtaaatatttttcgaggtaaattatgaattatcccattttaattactattttgatcttcttgctgtgctttggccgattcatttggatcattactcacgaacgtcgttccttacgcgctggagttagcttagttatcaccttatttagttttttatttttaggtgtagtcattctggttaatatcgctgaccttgatccacattacaaagactggattttgccattatttgtgattgcgctatttgctgtgatggctggaacgattatctttgcattaactttgatcattatgtttttctacgatggcattaaaatcattatcaaagaaggaaaccgctggacaaattatctttctctgggcatggggatttccattatcttcttcctatttttatatcctcttgtgggacgaattagtcatgatagctggttaaagtatccttatatttttctatggctagtcatcatctacttagtcactatcatgatgatgtatactttaacttcttggattaatttaattaattggcacatgccgcacttagactacatcgtagtgttaggcgctggcattatgggaacaaaggtaacaccacttctggcagcaagaatttcccggggaatagaaatttatcacaaaaatcctggctctaagttaatcatgtctggtggccaaggacctggtgaagacattcctgaagcagttgctatggctgaatatgctgaaaaactgggtattaataaaaacgatattattatcgaaaataaatccaaaactacccagcagaacttgcaattctcacatgcactgatgaaaccaaatagtcgcttctgtattgtaaccagctcctaccacgtgtatcgcgctctggttttagctaaacgtcaaggactcaagtgtactggttatggtgccaaaactaagtggtattttactttaaatgcttttgtgcgtgaattcattgcatatctggtaattactaagaaaatgcaattgactatcatcggttttctagcagctatcatgattgctgctgccgcatttcatttttaatttattgcgttaagttgagaaacttagcgttttttattgatttatcttttaatttttttataattatagtcaaatctatagaaagcaaggtgtaactatgaggattcgtaaaaacaacttgtcaaactgtcattagtcaggatgacgagtcctgactttttcaaaaaagcaggttacttatgtcagaaacaaaattcaataaaactcttcttagtgtcagtcatgtggatttttcctaccctaagcgcaatttattcaccgatctaaatttttctattgctaatggtgaacgtgttgctctagttgggcctaatggaattggtaaatctacactaattgacctaattcgtaagcaaatccaaccagatgatggacagattatttgtcacggtgaaattaattatgtacctcaagtcaatgatcaaactgtaattaatgactcaaagagcgctggtgaaaagcgattagctttaattgaaaatactatttggcttcctagttctcttctcttattggacgagccgacagtttacttagatgacacaaatatccagaatttactctacttactcaagaattatgatggagcaattctagtagctagccatgatctggattttatcaaccaactatgtgagagaactattattctgcagccaaataatgcagtttattacccaggaaattacgcacagtatctcgaacaaaaacaattagataaacaagccgtatacaattttaacgaaaagcgagatatattaaagcaacaaattactgaaaaagtctctactttaaagcaaaaaagtactgactataatcattttgctaaaacacaagacaatactggtcgctatccttcgcgaagccatgatcatgtccaaaaaggattaaatagtcggcttaagcgagctgaacgtgaactggctaaacttccagagaaacagcacctatatcaacatcaacttaaacttcctgaatttaaaaagtggccgactaaaatacataattactctatcaaaatagatcaattactcagtccccaaaataagactttattatctaatacacagttaaacttgcaaacagccgatattattggattaatcggccccaacggctgcggtaaaacaacattgctcaaatatttagaacactacattaatcagcagcaatctttgccaccagccagctacattggtttaaatacgactaaacaaaagaaacctgccacagtagcagatttctttcacgagactattttgagcaaaactgaagttaagcgtcttttagttaaaatggatatgtttgtcgatttgactacaagactcacggatttgagtggtggcgaatttgctaaattagcattaatcaagcagctataccttgaacaagaatctattctattacttgatgagccgactaactatcttgatccagaaagtgtgacggccttggcccaaatgctaaaacagtcgcatctcacttgtattattgcatcccacaattgcaaatttttaacccaattttgccaacaaatctataaaattaagcagcaaagactaattgaattgcactaaagcatttctcttaaacacatatttgctaagcatatcctttactatcctcatctatattaatgaagatcacatttggtgctgcagaagtttggtgcgtttctttattatatttaccaccataatactcataacgaggtttccccttgccaaaaggatctattcggcaaagaaagatcacatatgtcgctttgaattctttttccggagagccacctagcccgccatagattatttcttcctgataagcgttggcaacttccagaatgttttctcctggttcttgcgaccctacttgaatgattaacccgtatttattgcgcctcttgtctcgcgcaattacatgtacgattgctttttcatctaagacatttctatttggatcatcaagtgattttgcttcctgaatattgagttcgggaagcattctttgtactgctgtaagaagctgctcattatacttcttcataattcctgcggccatgtgatccaccattgccggtgacatttcattttctaacataaaaaaatcctcatttctaaaaatctgagagttttatccctctattacttattacgcaaaaaaacgcaaaaattttttcggaaatgaagttttttcaattttttagttttcttttctaaaaaatggactgagtagcgatacaagcaggccgtaaataaaataccagcgataaatatctgccaagtcttgattttgaatccacaaaattattgcaattactgtcagtaagccacctaaaaagattgttgaacccatatttttatcagtaaagaagctgatagcagcacctaaggtaattaacgctaccaaactataaatgacgataatcactggtcctttagtctgaacgttaacatcaagcattggtgcgttagtaaacagctgccacacgataaaaccagctaatgcaatgccacatagcaatactagtaatctaaaaacaaaagttaaagtctttttcattatttttctcctgtatgcataataatactagtataacagcaatatcgcggcatacgaaaaacgcttggatttttccaaacgcttttttactattcttttgcttgcataaattgttttctagtgatgtatttgattgatttaacgtattgccccttgtgttgaattgaaatatattggcctgatggatcgtagccgccaacctttttcaacaataaattctttttcgtcttaggattatacgccttcacattgtaataccgctgtgtgcctttatctacttgagcatagcttgtttcctgggaaatgaatggattcaatctatcagtaaaagagttatgaaatgaaaaaatgcagattactcccactactagcactagtgccgttacaaatgcggttttaatagtacttttattcataatattcaccttcatcgttcaactattgttatactaaaatagtacaccaattcagttactttaacaattgtttctagcaaaaaaacgcttgaaaaattccaagcgtctttcacctaagccaaaaatctttttatagcttcttctacactagcattcaatgattggtgcttcgttgcagcataattagccaatttttcatgtaatgaaggatcaatgcgcacattaaaattacctttaaaaggtttctctggtataactccatcttccttacagctcattagataatcatcaatggctccttgaaaatccttctccaattcatctattgtattaccttcgtaagaaataagactcttaatcccctgaaccttaccaaaaagaatcttatcctccaaagtatattcaattgaaccttcataacctttatacttcatatattgattagtttttttcatctttattcatctctttgattttatcttgaatttgtttgatttgatatggtaatagttcttttctaggatgtggtttatgaagaatgatccgatcactgccctttttaaaaataattctagatccactcgtttttcctttattatcgagttgataatctagttcatgcaatagtgttttagcatctttaaagtcaaacgttctgagactgtaaaatagtttgtgtaaggatgaatgattccttaaatttatttctttaaacattagaaaaaggagttcctttctcgtatgattggtttgaacaaaaaaaacacatacagaaagaagaactccttcatgaatgattttaccaaagattttgctcaagctctattcaatccagacaaaataaatgatttattgcgcaaagaactacaacaggctgttaataacttgttagaagctgaattgactgcctttctgggctatgatccctatgccagaaatggctggaatactggcaactctagaaatggtgcttatttccgcaaagttgatacgcaatttggcccaattgaagtgcaagtgcctcgggatcgcaacggtcaatttcatcagcacacgctgcctgactacaagcagcactcggatatcttggaaagcatgattatcaagctttactccaagggcgtgaccaccagggaaatagccgatctaattgaaaagatgtatggcagccattacagtccagctcaggtatcaaatatttccaagcagatgattccaaaggttgaggcttaccacaaacgcaagctaagcgacaagtttttctgcgtctatttggatgcgacataccttcctttgcgccgagaaacatttgagcgtgaagcagtctatattgccattggcatcaagcctaatgggcacaaggaggtcattgactactgcattgcgcctagcgagaacattgaagtctggacagatatgcttcaaaacatgaaatcccgaggcttaaagcaagttgagctttttctttctgatggtgttgttggcatgaaaacagccttagctcagacttatccaaaagctcattttcaacgctgtttggttcatgtcatgcgcaatatctgcgctaaagtacgcgtcgacgatcgtgaaaagatcatgaacgaattcaaacaggtgcatcaacagacaaacaaagaagaagccacagctgtcctgcatgacttctataccaaatggggcaaggtttacagccatgttatcagaagcttgaaagacatagaaccagatctgctggtcttttataactatcccaagcagatcagagcttcaatttattcgactaacatgattgaatcatttaacaatgtgatcaagcgcaaagctaagcctaaggcagagtttccaactgaacagtcgcttgatgcatttattggcatccaggcaatgagctacaatgaccgttatttcaatcgaattcataaaggcttgggtcaggttcaggacaccttagaatcctactttgattaaataaataattaaaaaatcaatttacgagaaagaactatttacacaaaagatttgacagtttcaacgttcttggatgactatataactttattaatagcttttctaatttactcacgttatcctcacttaagtatataatataatatatcatttgtaactaaatttgcaactaagacaaattatacctaattcgctaaattcacgctactaaaaaagcgcttggaaaattccaaacgcttcttttgtttaatcatctagacctaacttcttaaagatatcatcaacatgacgcaaatgatagtgataatcaaatgcatcatcaatatcttccttggataggtaattcataatttcactgttttcaaccaatggcttaaactgcttttgctcattccatgatttagcagttagcttctgtaccatatcataagctttttcacgagatagacctgcttcatcgatcaacttaagcaacactcgttgagagtaaattaatccatatgtacgatccatattcttaagcatcgtttcagggaatacatctaagttagtcaaaattcgattgaagcggtgcaacatatagtcgacgccaatagtcgtatcaggcaagataactcgttcggcacttgaatgagaaatatcacgttcatgccataacgctacatcctcgtatgctgtaacgacatgtccacgcattactcgagccattccacagaggttttcagatccgatcgggttacgtttgtgtggcattgcagatgatcccttttggccagcgcggaaatgttcctcaacttcatgaatttcactgcgctgcaagccacgaatttctgtcgcccaattttcaatactagtagcaatcaatgctaatgtcgcaatgtattctgcatgcaaatcacgaggcaatacttgactagtaattggctgttgtgtcaaacctaattgcttcattacgctagtttcaactgcaggtggaacattagcaaaagtaccaacagcacccgaaattttgccagattcaacgccttttgcggcatgttcaaatcgttcaatatcacgattaatttctgcgtaccagcgagcaatcttgagaccaaatgtagttggttcagcctgaacgccatgtgtacgtcccatttctactgtgtacttatactttttagccttttctgcaatagttgcttttaattcgtgcagatcttttctgataatctcatcagcttgtttaagtaagtagccttgagcagtatcaaccacatcagttgaagtcaaaccaaagtgcacccattttttctcagggccaaggctttcagacacagttctagtaaaagcaaccacgtcatggtgggttacttgctcaagctcagccacacgctctgcagtaaagctggcattcttagcaatcttctccgcatctgcttctggcacttcaccgagttctgcccaagcctttgttgcggcaatttctacttcaagccaagctgcatatttattttcgtctgtccaaattttccccatttctgggcgagcataacgttcaagcataaattacatttcccatggattcttcaaaacaatagtttgttcacgatctggaccaactgaaacagttaccaaaggaacgccaaccaactctgaaacgcggttcaagaatttcttagcattttctggaagagcgtcccaagtcttaacttgagtaatatcttcatcccaagctggaagttcttcatatacaggcttacatctgtataattccttcaaacttgctggataataatcaatcttttcaccatcaagttcatatgcagtacaaatcttgatcttgtcaaaacctgaaaatacatcaagcaagttcaagctaaggccattgataccagcaacacgctttgagtgacgcaatgcaacggagtcaaaccaaccaacacgacgtggacgaccagtaacagtaccatattcatgagcagtttcacgaatacggtcaccaacttcatcaagcaattcagttgggaaaggacctgcaccaacacgagtagtgtaagccttgcagacaccaattacagtatcaagacgattagcacctataccaatacctgaacaaataccaccagaaatagtattagatgaggttacaaatggataagtaccttcatcaatatcaagcatcacaccttgcgcaccttcaaataaaactttcttattttggtcaagtgcatcattcactaagacagaagtatcagttacatacttcttcattctttgaccatattcatagtatttatcaaaaatgtcttcaaatttaagtgctggcttaccataaaccttagtaaataattcattctttacttcaaggttagcacgcaatttttcttcaaaggtgtctttttcaagcaaatcacaaacgcggattccaattcttgaagccttgtccatgtaagttggtccaataccattcttagtagtaccaatcttgttagcccccttagcttcttcttgatattcatcttgcttaatatcataaggcataatgatgtgggcacgattagaaattctcaagccactagtatcaatgccactcttttcaagattttctaattcgccaaacattacttctggattgattacgacaccattaccaataactgtattgtccttggctgcaaaaataccagaaggaattaaacgcatcttgaaagtttgaccattaatatcaatagtatgacctgcgttgttaccaccatttgaacgaactgcaactgcagcatccttactcaaaaagtcagtaatctttcccttaccttcatcgccccattggcttcctacgactgcgactgctgtcatttaaaattcacctcataaaaatctctataaatattacgtatgctagtctagcaattaatttacaaataatcaatataaaatccgaattattttatttttaaattatttcatagttcgatttttatattgacaaacacaaattattcccatatagtatgtctcggtcaacaaacaagattaaagggagcagttttaaaatgagtaactactttagtatggaagcctttgactatgatgatatccaacttgtacctaataagggtattatcaaaagccgtcgtgatgcagataccagtgtcaaattcggaaaccgaacatttaaaataccggttgttcctgccaatatggaaagtgtcattgatgataaccttgctatttggctagcccaaaacgattattattacgtaatgcatcgttttgaacccgaaaagaggatttccttcatcaaaatgatgcatcaaaaaggattattcgcatctatttcagttggcattaaagacagtgaatatgattttattgatgaattagtcaaggaaaaccttaaaccagaatatattactattgatgtagctcatggtcactccgtttacgtgattaagatgatcaagtatattaaggaaaaattacctgattcatttttaacagcgggcaatattgctacgccagaagccgtacgtgaactcgaaaatgcaggcgccgatgcaaccaaagttggtgtgggacctggtaaagcatgtattaccaaattgaagactggctttggtactggtggttggcaattagccgcattaagaatgtgcagtaaatctgcttctaagccattaattgccgacggtgggattcgtcataacggcgatatcgctaagtcaattcgttttggcgctaccatggttatgattggttcaatgctggccggtcatgaagaatcacctggtaatgtaatcaaaattaatggtaaaacttacaagcaatactggggctcagcctctgaggttcaaaaaggtgcttacaaaaatgtagaaggtaagcaaatgttagtgccataccgtggctcaattaaggatactttaaaagaaatgaaggaagacttgcagtcatccatctcatacgctggtggtcgcgatcttaattccattaagttagtcgactacgtaatcgttaaagacaatatttttgatggtgataagtaattttaataaaatttttgcatttttattattttcctgttaagaatattacgataatatagtattatacgcgtggtgctagttaaatcgttttagttaataaaaaagtccaatcttgttagactcaacttgtataataatagaaaagagcctgatctgattgaactgccttaagcttaagcgttttagccaccatttacaagttagttttaaagatttagtgataatttgtcggcactggtatcgtttgtatgcaccggctgagtttactcatcggcgaaatattgatcaaattaaaactacggacagtctgattttggctttacttatctggcaagctaagacaggaattgaatcacaaagaagattctgtgaatgtttcaattgtttatcacactcacgttttaatcgacgttcacgtcagctattgcaattgatttatcagatacggcaagaaatgaataaaaaggttgacctgaatggacatttcttgatcattgacagctttccggtacctgtttgccaaccaattcgcaactatcgtgctaaaatttttcgcggttatgccaacattggttataaggccaccaagaaaatttacttctatggtttcaaagttcatgtcattgttagcgatgacggttacattcttgattatgtcgtaacaaaagcatcagttcatgatgccagggagacagttgaactgctggaaaatacccatccatctaattactatcttcttggcgacgaaggctatttaggcaaagaactgcatcaacagctaaaacaaatgggttatgaactttggacaccatatcgtaaaaatatgacaggagctaaaaagcacaatgatcatcaattgatggctattcgcagaacaattgaaagcgacttttcgcttctgacctattacaatgccgagaacaatcgagcacgtagtctgataggctttcaaagccggttggaaattgcaattttagcttataatttggcttattgtctagaacgatttaactagcaccacgcgtagtattatctatcttttttcgatagaataatataagtcgagttattgtagggtagtcaataactcggctttttttgattattttttaaaaacgattggacagagttttaaattgtgttatactagttgtcgttgatgaatgcgcccttagcgcaactggatagagtgtctgactacgaatcagaaggttgaaggttcaaatccttcagggcgcacttaaaaacgggaaatggctcagtttggtagagcacctggtttgggaccagggggtcgcaggttcgaatcctgttttcccgataagttagccgcacttcattgaagtgcggtttttttgtgtaaaaaaataagtattccctcggaaatacttatcatgctatgcccctttagtagctcgtctaaagataatctgtgtatctgaatctacatatttcaataacggtaaatcgtaatccttaacctgggccaaaacatttactttctcattgcatggcaaatcgcgtttagtaatctcgatttcgccttcataacgcggatacaaatgattatcaatcgtcacgctgccagttggtctagcataaatattatcttgcggctctgttgacaaaaacatcttttttctgctttcctttaagcgaactacgtcacgcgccacatctggacgattatgccaatcattaccaaacaattctggtatatcagtatctaaatgcagtgtaattgcaccctgtttttgataattagtaatcgattcaattgcatccctcgtaagttgcggatctcccacaaaaatgtgatcgcaatcataatctttcaattctaagatcgcagctaatgggttttcatatcgctgcttctccaacgttggcaatcctgcaaaaattggtccacgcaatttgccatttcctgaaataaaggctgctgttttcaaaccatattgcttaagccactcattcttcttttgcatccagtgtgcatcaagacctgtttcaggacgtgggtagaagttatgtcctgctgttaatttttcaaaatttgcattgctataacgcagatcatcaatattttgttgcgtaataatgctggcatttagaactatcggcatttctttggacaacttggcaataatatcagtagaaaatccatgatctactctaagaccagttagactcaaacttttaatttgctcaacactattgacattaatacccaaatcttgcagatcatctgccgtgacatctgcaataattttcaagtctagtttttgacaccaattagttaagtccgccagccgatttaaaatcgtctcactatcagtatcaggtacagctagctgagtaaaaacgcaggtaaatccactattgcgcatcgtcagcaaataattgtaattctcggacgtcaaatcgtgtcctagataaacagaaaatcctaacattcttattcctctaaaattaattaatttcttttattatctatagcttaaacgctttcttaaatatcttactacattttttgcttgcttttttctaaaaaataatgttaaatacatataaacaaattaaaaagcgatgaaaaagacgagtaaataatctaattctttccagtgaattagtgctagtgtgaaactaatagaccctggattattgaaaaacacttttagcagctcactgaaacaataattcttagagtaggttgagacgtctccggtacgttaccacgccggtggagcatgatagtgcttcatgagtcggtctattaaaatatagacaatgtgggtggtaccgcggaaaaaagcctttcgtccctgtttttttagggagcgaagggctttttctttgctctaagtacattagaaagaggacttatattatgacacttattttacctaaagattatcacccaacattaactgtgcgcgacactgaagctgcgattgtatttattcgtgaaaccttccaagataaattggcagaaattctcggtttacaaagaatgtcagctccaatgtttgtcgaaaaaaagaccggcttaaacgacaacttaaatggtgttgagcgtcctgttgcctttgacatgaaggcaatgcctaaagaagatactatcgaagtagttcactcattggctaaatggaagagattggctttgaaacgctatggtttcggaatgcatgaaggactttacaccaacatgaacgccatccgccgggacgaagatcttgataacttccactccatctatgttgaccaatgggactgggaaaagattattagtaaacaagaacgcaacaccgacacacttgaagttactgtgatgaacatttttaaggcaattaaggcaactgaaaagctggttgctgcacgctacccaggctctacttatcgcctagctgatcacgtttcatttattactactcaagaattagaagatcgctggcctgatctttctccagaagagcgtgaagataagattgctaaagaagaaaaagccgtctttattatgaaaattggtgacaagttaaagcgtagtggtgaaccacacgatggccgtgcaccagactacgatgattggcaattaaacggtgacttagtcttctggtatgaaccgcttaacagtaagattgaaatctcttcaatggggatccgtgttagcgaagaaagtttgcgtgaacaattgaaaaaagctcactgtgaagaacgtgagaaattaccattccaccaaatgcttttgaagggtgaattaccttattcaatcggcggcggaatcggtcaatctcgtctctgtatgttgctgttaggtaaggctcacattggtgaagtacaagcttctatttggccagaagatatggttgaggcttgtgaagctgacgatattaagttgctgtaattttaagatttttttacataccaaaaaagatcctgcaaaatgtaggatcttttttctattgattttatttccgttctcttctagaaatccaagccataatcaatggcaacaatacaaagccaaagaccatcatcgcaatggcataccagttaacaccgataacttgccctgctgcgtttactacaccaaattgtgccttccagttatattcaactaacaagaagatcacaatcacaccagataaaattggcacaataacatcagtcataacgctcttattagcctttaagatatcttcttttgccttaccacggtaaaattgaataactgctagaggtaccacgatgaaacctaagaatctaaccatcgcgctcaaagtaatcaagttgaccatattgtattcaaaggccatcggaatcaaaattgccaagccaacagagataaagaaagttctaattgggaagttattcttagttctcttagttaaagcttgtgacatctgaccctcacgagccatagcttccagaatacgtggagcattaaagctggaagctacgttgatcccaaacattgaaaccaaggcaccaaccaagattacatcacgtaagatttcattattaaaaatagccgcaatcgctacaacttgcttagttgtcattaaagcacgtggattaagtaccatcgctaccgctacaacgccgatatagacaaccgcaataattaagattgccaatggaattgctcgtggcaagttcttttcagggttcttcatatcttctgaaccagaagctactgattcaaagccggtaaaggcatagaaggctgaaacaattgacatgacaaaggtagttgtagttaaagttggcacaattttctgaccattctgagtcaattgatctacttgccctaggttgcttgatgcaccagtagtaattaacaaaactactccagcaataataattaataccaatgcagccaacttaccgatagtagctaaattcattacatacttaactactttttgaccaaacaagttgatcacggtaataattgccatcaagatcaaaaagccaattgtgacatttattgccttattgggatttccgccaaaaattgaaatagttgacttaattaccccaacagccattacgccccaagctacactggctgagaagtaacgcagaactcccatataaaagccaatttttttaccaaaagcggccttggaataagcataggcagcaccagatttagtgacatactttgaagctgccgcaaacgaaatggccagaatcgctgcaaaaattgccgcaattaaatatacaactaaagctttactaccggcttgctgtaccacactaccaggtgttaaaaaaatacctgaaccaataatggcattaatcgctaacagcacaattgaccaaaagcctaatttatctcctgttttttcagtcatctatttgcttccttactttgcattatcaacaacaaacttaaataagttattcataaacgctacatcggaattacggtgcaacatttcagggtgccactgcacggcaatgacattaccttgtttattttctagcccttcaaccacaccatcaggagctgttgccactgcttttaaatctggtgcaacgtctttaattaattgatggtggaaagaattaacgcgaaattcagttttgcccaaaatttcagccaatttactatcagcttccacttccatactatgagtaggcaaagttggcgtatgaccttgcatgtgtttcaaagtaagttcttttctgtatgaaagatcttggtaaagcgtaccgccatgagccacattaataatttgagcaccacgacaaatgccaagtaccggaataccattttcttctgctaactttaacaagcgcatatcaaaatgatcgcgttcaggccaagtagcaccaatcttttgcattggctcctcaccataaaaacgtggatcaacatcatgcccaccagataagatcaagccttgaacatgattaagctgttcacgaatcacctcatcattttcagtaaatggaataatgtaaggcacaccgccattttgaactactgaatctacatagtcttcgttcacataactacgatggtatcctgggaaaattcctctatcgtcaataattacagaacctgagataccgataattggttttgtcatttatgctcctccttctgcttactttttgtatgtaatattatagagaaatttatgcaaaaagtacaattaaaaaattgcattgttgtctataatttttgcatatctttaaatatagtaaaaaacagcaagccttatttttagctcactgttttatgctatttataccaaattccaaaaaggatttccattacatgctaaatatgtttctagccactgtttaaaagagaaatcaaaatattgttcctctattccaggatacgttagataggactgtttttgattgtagcgatctaaattaatgcccatttctccctcgtctcttaaccaaagtataggtagataattaggtgttttaactaactgatttaagacatactcaatagtgtaaattctacaccttgctccacctaattcgatgccttgaaaagaatcaatgaataattctgcaccgttagcctgtatccaaaactctatcaaatcatttgggacagatatgcctgacaacctatttattttattttcagctactggcggatttaatttaaatttacagtaatagacgccaccaaaaccaaatattggtacgtcgacactgcattttttactaatcaaatttatattatctattatattatccattttaataattaataaaccatttagttataagcttatgtgcttcaattggtactggcattaagttgtcaaagtcattatttccaccataaattctaggtcttatatgatgaacttgattttcagcccaatactcttttgattgattgccataacgctcactaaactcttttatatagtaatatctatccatcgtagtccatactggtgaagaaggaagtctagaccaagtagtattgattggtgtttctgcatcttttttagagacaggatcaacatattcaggaaaattttgaccaattttattttgtaaataaatagaactaagtgaaattggataagtagcgctatttccattatagcctaccattccccatgctcctccaacagcaaaaaatgttgtagcagctggaaatacagcagaccctaacaaaccagtagtaatattgccttcttttacaattggactagctgtatttgtagtaattgggccggacaatgatggttcactatagaattgcaattgaactgaaattgcagcaggagctggaccagttattgaatcaatataaaaattgattttaaattgtccatctacatactcttgtgaagtatgaaatttaacaactgtatctggaatctctgccaaaaaagtatatgcagagtaatggctacttgttgcattaaaattattatgaatttttacagttccattttttaaaatagggacatctttttttacattttcattctttaacttatcttgagctaaagaatgaaaattttgttcattagctattttagcaacattcttatttacatcatttagcgagtcagcctttgcatttgtattgatagctataaagcacacgatagtggctaaaaaagcaaataactttctgtatttcatgtttctttcctcattatctataatttttaacacaattataaggatctttctattattctaccatacaactctatcacataagcaagtgctcccacactgtagcatcagatgctactgggatttacactctagattgatgtatacgaagaacacaattacaatcagaataacatgaaatactactatagcgacaatttaaaatatacagtaaaatctttaaactgtatttcttattctaacccttgttcaaagcgatactgccgtaatacatattccttgaaaaacggtaaagtaaaggccacttcaccataattagtagatttgataacttgatcatctaacaagcgtctacgatagttagcaacaaaattgcttggacggtttaacctttcatgaatttctttaattgaaacacaatgttttgggctctgagccatagctaaaacaaattttcggtcttgctttgacaaactactaagtactttggtataaacattttgctttagcaccaataagtactctgatttaatacattctaaagtgttttgatctattaccttactttttttagcagctttcaaaactaaataacctagcaactgaaaggcatatgaatagcccattgtcatcaacgccattttttcaagaatttttttcgacacttgataacctgattctttaaaaactttactatagctagcttcaacctgtgagagattcaatgctgataaagctattcgctttccacgtagtaagaatgaagttatattttcgtttttcaattcagagatattttcagaaagaccagctatcattaaggctataggataaccctgccgatttaataattgataacatcttgcaaaatctttcaactcctgacatagttttacttcgtctaaggtaatcaacactttaacgtcattttttcttacttcatcaaacatgttcgttaaaatatcttgatatgttaacttactaacgtctgtagaaagcgataatccaaaattagagaaatttagtccttcaatagatttaaatgatttttttagttttgaatctgcattcagatataagctattaataaaagaaggcaacaacttcatccccatggccaaattaacaacaatccaatctggatatgcactaatctttctgtccattgctgtcaaaaagacagttttgcctattccacgcattccataaacaatcgaaattgtatatgaactatttaaattctctattccttgagacacatcagcaattagtttttttcgctgcaaatacactgctggaattcggccaaagctaggattaaacggattatccatattttgtccccaatcattttcttatcaaaaaagcagcaggcttcttacctactactcaattttatttatctttttgatgcttaaccacataaatcagtgccgcaataatcaacactgctgcaccaaccgctactgaaatttgcgtctccggattaatgaacatgaagacaacaattactaccagcataatcaaagcaaagtaatttgaatatggataaagcggcaatttaaacgggtgattctccatcaagtgtggattctttcgtctaaagcgtaactctgctagcaggatcacaaaccaagctaccatccctggcaaaacagatgaactatagacaataacaaaaacattagccaatgatttattcaaaaattgggctaacacattaagcataaaaccaacgaaaattccactggtaattccaatgatcgcatgactaggcacgattctcttagatacgtgaccaaaagtcttaggtgcttcaccttcgtgtgccaatttatacaacattcgacttgatgaataaattcctgagtttgcaccggacaaagctgcagtcaaaactacaaagttaattactgaagctgccgcggtaattcccaccttggcaaaggtcgttacaaacggtgagccaatgctatctaatttattccatggataaattgtgacaatcacaaaaattgccccaacataaaagatcaaaatccgccacaatactgacttcacgcttttaacaatggccttatgcggatcagatacttcaccggctgaaatcccaattagctcaattccttcataagaaccaacaataatggccattgagaaaaagaagcccttgagaccaccagtgaagaagccgccatgactccacaggttagaaaagcctactggatgaccgccattaccaaagccaaatagaattaccgcaaagccaagtaaaatcattaagataatcgttacaaccttgatcatggcaaaccagaattccaaggttgcataagctttcgcactagctaagttagccaccagcaaaaataaaataataattacgccggcaacccaatcagaggtgcctttccaccaaaagcgcaaatactctgttgttgccaccacctcagaaattccgacaacaatgtattgaaacacgtttgcccattcggctaaatagccggcaattggatgcacatgctctgaagcatagtctgcaaaagaaccagtacctggatcaacataaagcatctcacctaatgcccgcattacgatatacaaaataaccccaacaaaaatataagctagcagtactgaaggaccggtccacttaatggttgagctagcccccatgaatagtccaacaccaattgctcctccaagtgagatcatttccatctgtccggctgtcatcgaccgctttaattcaggtgctttcttcgccatttccaactccctttctttagcatctgtaaaaatttcctaggaaatatatctattctcatttatctttaatcactataccttatcattttttcgaacaaaactgtagctgatcgctaaaaagattgcaaataaaatcgaaataatcaaagccagctgcgttgatttgataaagaataataagattaaaataccaatgtaaaaggcaagcgtaagccagctagttactgggtagcccggcattttaaagctgcctaaattctgcttattctgtttgcgataaacaatatgtgctgccataatcatgatccaaacaatcacaaaacaaatcgttgaaacagttgagacaacggagaatatttctgctggcattaaatagtttaaggcaactactacaaataaaattaatgaagaggtcatcaaagcgttcattggaattgcttttttggtcaattcacctagtcttttaggtgcatggccgttacgtgctaatgaataaagtgatcgactagttgaaaagattgcactattagtcgctgacatagctgcagtcaaaacgacaaaatttaaaatccctgcagccgctgtaacaccgatgccggtaaagacctggacaaagggacttgaagtagttgtaatgtgattccatggataaacagacataattgccaacattgagcccacataaaaaaggccgattctaactggcaaagtgttaattgccttaggaatatccttttgcggattagctgtttcactagcagtttgacctacaatttctaccccaacaaaggcaaaaacaaccatttgaaatgataaaagaaagccccaaatcccagttgggaaaaagccaccatgattaactaaattagttagtgaaacataaccgccctttacatgcgtatgaagtaacaacattacagcaccggtaatgattaagactacaattgccattaccttaatcattgagaaccaactttccagttcaccaaataatccgacatttaccatgttaatcaacatcaataagatcacaattactaaagggccaacccattgcggtagccacggaaaccagtatcttaaataaattcctgtcgcagtcaaatcagccatagctaaactaagccagcaagcccagtacatccagcccgctacaaattcggcacgcttacctaaatattttttgattgactctaaaaatgaatgactatcaggatcggctaaaataagctctcctaaagcacgcatcataaaaaaggtgataatccctacgattaagtacgacaaaataattgaagggccagcactatgaatggctgaaccagaacctaagaataggccagtaccaatggctccccctattgcaatcattgttacgtgacgactcttaagcccgcgttttaatctcggcttctcatccataattactcacaccttcctcaaaataaaaaatggagcggcatgttttttaaatgaaacatgttgctccatcaagtttgctttttttgaattatatagtcttataccaattcatgcaattattttttatctaaaaaagatattcccttaggaatatcttcattattagtaaactttaaattggttcaacggccagtaacgtactttaactacgccaacgatactactacgcttaatggttccgatataacggctatccttagaaacgctccggtgatcacccattacgaaatatgttcctttcggaatgcgcccagtatcctgcacatatttaatctgcgctctagtaaagtattgctggtaagtccgcgcccgcatcagtgactgcatagtaaaattctgagtctcagaataaaatgtatctgagccattatcaattaacttcgttccttgtttcaaccaaggttgagcaatctttttattattaatgtagatttgattatttttgctgacgattttttcaccaggcaaaccaataacacgcttaatgtacaaagcacctggttcatctggtgctttaacaatcactacttcaccacgcttgatttgcgcatgacgctcagcgattagccgatcaccattttgaaaagtaggttgcatcgaaagacctgatactgtatcgttgctcaagacgaagtggaaaagcagcagataggcaccgatcaaaataacccagataattaagatatctaggaaaaacttaccccatgattctttttcttcttttttctcagccattatttttctccatttatctttttccacagtttacaactttatggagaaattgccaaattacaaaaaagaggtatttcctcggaaatacctcttttattattaatgactattaattagtcttcttttttgtcttcagttttagcttcgtctgaaacttctaccgttacacccttcttagcaagaacatgagacatcttcttcaagtaaatgttaatgatcttgcccatgtcttgttcagtaagtgagttgaatggaacgattgcgtccaaacggttcaagaattcaggtctgaagtagttttcaagggctgagattaacttgtcttggtcaaccttgccatcttcaagcaacttgtctgagaagccggcgtttgaagtcataatcaagatagtatccttgaatgaaacagttctaccttgtgcgtcagtcaaacgaccgtcatccataatttgcaataatgcgttgaagacttgtgggttagccttttcaatttcatcaaataaaattaatgagtatggttggtgacgaaccttttcagttaattgaccaccttcaccgtagccaacatagccaggtgctgaaccgatcaacttgttaactgccatttcgtcttggtattcactcatgtccaaacggattaagtgttccttgttaccaaataattgaattgccaattgtttagcaagttcagtcttaccaacaccagtaggtccagtgagtaagaatgaaccagtaggtctgtcgctgtctttgaaaatttgcttacgagcaatagcgtcagtaattacatcgatagctctgtcttgatcaataacattcttcttaagtttcttagctaagtccaagttcttttgagcttcatcagcgtgaagttcactcattgggatcttagtcttttgttcaataattgcgtagatgtctttttcagttacttctggagtattcttagaatctacattcttaagttgtttctcaagttcagcaatcttactcttaatttctgaagccttgtcgtaatcctctgccttagcagcttcagtcttcttagcttcaagagctgagatttggttctttaagctcttttcatcagttgattgtacaagcaatgccttcttagcaccagcttcatccatcaagtcgatagccttgtctggtaagtaacggccttgaatgtatctttctgataattcaacagctaatttaagactgtcgtcactgtattttacgtggtggtagtcttcgtacttcttctttaagccttccaaaatcttaacagctacatcagtagatggttctggaacttgaacagcttggaatctacgtgataaagctggatctttttcaattctttggaattcactagtagtagtagcaccaattaacttcaattgaccacttgccaaagctggcttcaagatgttagctgcatccccattgttgttttctgaatcagtagaaccagcaccaacgatgttgtgaatttcatcgatgaataaaacaatgttaggatcgctcttggccttgtcgataaccttctttaatctttcttcaaagctaccacgaagacttgaaccagcaaccatgtcattaatatttactgaaatgatatgcatgttagccattttagctggtacattacctgaagcaattctttcagctaaaccttctacaatagaagtcttaccaacaccagcaggtccgattaaaacaggattattcttcttacgtcttgaaagaatttcaattacgttatcaatctgttcgtcacgaccaattactgggtcaaatttattgttcttagcttcctcaactaagtcaacaccaattggcttttcattgggttgttgtgggttctgttgaattgtttgtggtgcagcacccatgctgctggagtaattaattggaattgaacctgaactgcctttgctatttcttctgctaccaaagtcgtcattaaagaatgagctattcaattcgttaaataagttatcaaaatcattgtcaaagtatgccatatgtgcaacactccctatctcaaatttacgtctttagcactctagcttatcgagtgctaactcattacatttaatagtatagcaggttatccacagactgcaagctaaaaaacaaaagttttgcacattttcctttatttttgtgatttttatttaaaaaagcactacaaatgctgcaatataaacatttgtagtgcttcacaaattataaagaatttcttaagatgggcaaaaattgatgattattttgcttaaaactgttgaattttaaggaagttttccacagataagaataagtttattaccataaactatttctgcctacctctattattgcccttttgcttgtccagtattttgcggttcgctcaactttctcggcccaagaaaatactgtttaattactttgattacctgcttattctgaggtaaatccgagtgatccgcttctacacccgttactgtcattgcagtatagctcttgacttgattctgaaaaatatattttccggctgctacgctagcttctggtacaattccatcagactcataattttttccaccagataaggaataaacaatcaagtttttcggtaatttatctttgttcttgataaagttttctagcatttgcgttttatgattaatatttttttcaccaaaattatatggcgttcctagcgtcatcagacgtttgattttaatttcatcagaatagtaacagtagtaatgttctaaccaataggtccagatcaagccaccgttagaatgcccaaaggctttaaaattattaaacttatagctctctgataaggcataaaaggcttgatcaaaccagctggcttgcttcttaatattgctataaccatcgtgattattttcaaaaccgacaataatgaaaggttcgttgtcgtttttattaattttgcctgaatatgacagcgttccattcgttgaaactttaattttaagcacgctatgcttagtcggtgtgttctgatttagctgcttcactaattggttaaaacgttcagtcgttgcactagaacctggaatcataattactggtgacaaaagcgatttgcgtctttcagctctagcgtggttatcagccttcatccaagaataacccggaatagccaaagctactaataagactaagacgattgccaaccatttaaaattaggattttgaactaaattaatcatttttttcttcataatcctttagtcccctttcaagtcgcaaacctaatttcatagttggaataaacattattatatccaaaatgaataacaaaatagaaaataccaagttgctccaatcaccattggaaccaaagaaagagaccaaaattcctggtgtcccacttaaaacggggtaagcacaaggttgaattaaatggcaaaaaattgctccagcggctagtagaatattaataattggaataatcacaatcgccggcagtaacaatggatttaaaataatcggcatcccgaccatcatgcctccagttgagcccaaagctgctggaagcaggttaaccttggcaatattttcactatccttatttttactataaattaggataattacaatcatcgctaaaacaatactcgcaccacccatttctgcataaggataaaacaaagaactacccaaatacttatatggtacattccaagcactcccatgttttaaggcaaaatttaagttagctgctgctgaaatactattagaagtagttgacaaagaagctagaggataacctattcccatccagctaagtaaaaagactgggatagtcagtaaagctattaacaaaatattatttgattcctgtatttgagtaactaggcctttaaaagtactagaattcaagaatttgatttgaaattcataaattataatccccagaactatcccacaaaaaattgcaaatattgtcgggataaacgcattccaggctctttccttaattctagcggcatgttcaaaatcgactggcttgtgttcctttcctagccaatgaaaaatttgccctacaccatagccaattaacaaggccagcaagacagcattaatttttaaaacactggaagaaaatggtgaatgatcgctggcattattagctaaattattggcataagcacaaaacatgataacgatgacagccgtcatcccggccatggttgaatctttacggtataaacgcgcagtataacgtgccgcaaaataagccgcataaataccaaataagccgaaggttacccgaaccatcccccgactgacaaatgctcccgcataccaaaaacgatctggcaaagtgatatcaaaattaaaaatattgtaaataaaactatcgggcgaaaaaacggcatctctgaacaacttaaaatatgccccaattaccgcgatcggcatcagcataaccaacgttcgctgaaaaattctaaagattgccaatcttcttagtttaagaaagatatttgtgattctgtttaccatggtattttcctttacctatctattctaaatatgattgaataaagttaattaaaacaattattaattatacatctatactagaaagctgattatgatggcttacattaacttaaaaaataatactaaaatttaccaatctggtgacacaaccatctatgccaataagaacattactttttctatcgataaaggagaactagtcattattctcggctcatcaggagctgggaaatctactttgcttaatattttaggcggaatggaaccaaatacaagtggcgatgtaattgtagcgggaaaaaatattgcaaaatataacgctaaagaattaactacctatcggcgcaacgacgttggctttgtttttcaattttataatttgattcccaacttaacagcaaaagaaaacgttgaattagctgctcaaattgtccctgatgcgatgagcccaccggtgcccttgactataaaacaggcaaacgaatcttaaaaattttgcaaaatatgagccggcaaaatggctcgacggtcttgattgtaactcataacgccgctattgccccaattgctgataaggtcatccgtattcacgatggaagtattcaaaaagtccagcataatctacatcccgctgatattagtacaattgaatggtaggtgggcgacatgcaaaaaactattctatggaaagatgcttggcaagcaatcacccattcacttgaccgttacattgccattattctattaattgcactggggacttttgcctttacaggtttaaaaatggctggtcctgatatgcgagcaacaggggcagaattttttgccaaacataacttagctgacgtcactgtcacttcaaactatggcattaattcaactgatcgccttactattcagaatttaccggaagtaaaagaagctacttttggctattttcaagatgttaaaattaaaaatcaacctgatacgctccgcatcttttctcaatcagataatctttcaagttatgaattgattaaaggtcattttcctaagaataaaacagagattgcactgtcatatttattgcagaaaaaatatcgcttggggcaaaacattacttttaataaacctggcattttaaaaaataagacttacaagattgttggcttcgtcaaagctagtgagttcttagataaaaatccaatcggtcaaaccaacattggcagtggccatttaactggaattgcggttgctaatcataacgccttcgccgcaccagtttatcaaattgcccgaatcattttcaaaaataccgccaatttaagtccctttggcatagcttaccgcaaccgtgtttataacgatcaaaccaaattgcaaactgctttaaaccaaaatcgagccgacaaatatgacaaatatcgggccatgtatcaaaagcaatatcgacaagctgcagctaaacaattacttaaacgtggcatcgtagttaacccggcgcaaatcaaagtaccacagaacaagcttaaaattgcttatcctaactacgtaatcaacagccgtgaagaaagtcagggttatgcttcttatcgagcagattctgaacgagttgaagttttggctaatgtctttcctgttttcttgtttgctgtagcggcttgggtcagcttaactacaatgatgcgttttgttgaagaagaacggactaatattggtacgctaaaagcactaggctatggtaatggagcaattgccattaagttcttgctctatagcacctcagctgcaattttaggtgttattctgggggctagcttaggttacacctttttgcctaacttaatcatcaaggcctatttagctagctcaaccttaggaactgattaccagctgaattttgcttggggaccactattaatttcattgacgattgcactacttgcaacaaccgtcgtttcaatgattactttagctcaaactctgcgtgaacagccttcagctttacttttacctaaaccacctaaaaatggttcacgtattttactagaatatattccatttttatggaagcacatgagcttttcagctaaggtaacagcccgcaatattttccgttataagagcagaatgctgatgaccatcctaggcgttgctggttgtactggattactagtaatgggatttggtattcgtgattcactacacggaattggcaatattcaatattctgaagtacaaaaaaatgatgtcatcgctttgaaaaaccgccatgttaacacgactgagcgacaaaaattaaacaaaatttttaccagccatgatgttacgcaaactactgctgtacaatatcaacaattgactaaacaccttgatagcactggagcaactgaaaatgtaatgctaattgcgccacaatcaactaaaaactttagcaaatctatcaatttgcaagaacgtcaaagcaagaaaaaacttgttttgtcaaataatggtgtagtcatttcagaaaaattagctactatcttgcacgctcataaaggttcaacaatttccttaaaaaatgaacatgggaaactacttaagttcaaagttagtggaatctgcgaaatgtatctcggtcactatatctttatgagcccagctgaatatgccaaagaaactggcaaaaaatttactactaatgcctatttagtaaccatggccaaacattccccaggaaatatcagccatattagtcaaaaaatgatcaaaacaggcgcaatcgaaacggttgtctcaacttcatcaaatagaaaattgctgagcagtttcactggtagtctaaatgaagtcattctaatcctaattttaatttcagggatgttggccttagtagtcatctataacttaactaatatcaatgtcgctgaaagaattcgcgaattatcgaccatcaaagtgctaggattttacgataatgaaacaacgatgtacatttatcgcgaaacaatcatcttatcggcactaggaattatcgtaggctttggctttggttggtggctacaccactttattatcactagtttgccaccagatgtcgcgatgttcgatccgaatatgtacccgttgaacttcgtcttctctgcgctaattcccgctattatcaccgctattttagcaattgttgtccatcacaagatcaagcgaatcaacatactagatgccttgtcctccattgattaagcgctgttatgctataataatcactatagaaaagggtggaaaaaacatgccaagaaagcactttgaattaaacagtgatgttaataaattaatcgaaaaatatgatgaaattaataatgttgatttcaataagttagttaacaaggccttaagattctaccttgttaatcaaatgaactacaaagatgttcaagacgccctgaataaagctgataacgaagcttctaagtatattgatgaagcaatgcgttccagcatgggtgatattaatcgaaattattagaacataactaatcatggaaaaagccatctgttttgacagcaggtggcttttagtattcattacaagataatttattataaaaacaactaattgataatttctttactcaaaatgcttataccgataatatcgataacctatctttttaccaaaaatcgtctccgaagttttcatccaattagccagcaaaacataaatgcctaaaaagactaaaccgaagattgctaaataaccaaaactaccaacacggcctaagtcgttgaaacgatagccaaataaaatttggtaaacaaagagcaggataatgtaaatctcgtttgaaacaatgatcggcaacaaactccccatcttaacgccatatgtcttattaagcttgtgataactgagccaaattaccagtaagaatgaaatatcagttgaaagaattgcaccatccccattcatgaacatagtcatcggtacttgcaaaattatttttactaagacaccttcaaccatatagatcacagccagtttgttcatgttcaaagctaaaagcagtgttaatgaattcatcaccaaaccagcaaacaaactttgaacaatattttcaaccaaataatacgcacctaaactatcgtgtgagaacaagaccgtataaattggagaagccgcaaaagcaccaagtgcaacaaccggaagcaagacaaataatagtagtctatagttctctaaaagcagctttctaatgctttcttgactatcattagccttatacttaagccctgctaaaagcggcagactagtctcagaaacggctgtcgcaagtgaaataatcaccgtggtaatcttgcttggattagccgagaaaattgtgtacaagtaactaacatagcttttactcatatgactgaagctaatcaggatttgtttaaacaaaagttgatcaactaattgcgtaacagtaatgaacgatcccagcaaaacaaacggaattgaggcataccataagttaagcaaactacgagaaacattattaagtgctctgggctcgctattttcaattaattctcggtaatgtccccactgcttgcgcatatatgcaaaaagatacaggtaactagctatagcaccaacacaggcgccaaacacactgaaataaaccgccgttacgtaatcatgatggaagacttcaataatcaacaaagtagccagcaaaataaacaaaattcgagcaaattgttcccataattgggaaatcccatatggcttcatatcattatttccctgaaaccaacctcgaaccatactcattgatggcagaattactacggctggcactaatactcgaatagaaattgttgcactagccactgaatccactggactatttttggcaatcattggtgccgtcacataaagcaaaataccacacgctattcccatgaccagcataatagcgaagcctaatttggtaatgtacaaactgtctttatatctattttgcgaatttaattgcgatacttcccgggcaataactgaaggaagtcctgccgtcccaattgataaaaacagcgcatacggcgtatatgacgaattgaacagcgcctgtgcgtttaattggttgtggtagcttcccagcataattagccaaggaatcaaataaacaaccccgagaattctagatacaatgctaccaaacgatagccaaaatgaaccggataggatttttttattcaatagaatagcctcaaatctacgttagtttctcattgtgccttcttattatacgtggattttataactttgtgggaaatatgtaccaactagttacccttttttaacaaatttttcggctctaataatacaaatcagttacattatttactatattgttacccagcctttaattttacgttagaccccttgacctaaccttctttaattattatccttaaaatgtttctgttaaaggtcataattagacaaaaataataatgtattaagaatattcatcgggggaattaagttgtcattcaagaaaaagattatcactaaattagcttatgttgctatgctttcaactactggcgttgccgcagctgcaatcgtgcaaccacaagcacatgttcaagcttctaccacttcagttgctgctcgctcactcggaatcgatgttgctagttaccaaagtgctgatctttcagctcacgctaaaagcggtgctaagtttgctgttgttaaagtaagtgaaggtaccagctacagaaatcctaaggctagtgctcaaatcgctagtgcccgcgctaagaatatgatgccaatgggctaccactttgctacattttctgctaatagcgctgctgctaaaaatgaagccaactacgcaatcgcatcagctaaggctgttggtcttggtgctggctcataccttgcatgtgactatgagtcaggtgacggcaacaatatctatggtggtaagaatcctactgctaatgcaattaatgccttcatgagcaaggttaaagctgctggttacaagccacttctttacgctagttcatcagttttaagaaacaacattaacactaactctgttgttaacaaattccctaactcattatgggttgctgcatacgctgtttcaggtcgagtagacaatcctaactttgactacttcccatcaatgaagggtgtttcaatttggcaatttactgacaactggcgtggtcttaacgttgacggtaacattaacgttttacctcttacttcatcaggtagcgctgtttctcaagcacctaagaaggctcgcgtattaaagaagaaggctcatgtatataacaaggctggtcaccgtacaggcaagactattaagaagggcacttctatcactacccatggcaagaagaaaactatcaatggtaagaaatactacaagattgccaagaatcaatacattagatcagctaacctttactaaaaaggcaaaataagtcatcaaaaaatgcaccaggtagaaattacctgatgcattttattttatccaattttttacttggcgaattgttcaccagctaagttacggtagaagttagccttagcttgacggtaatatgggttaacccacaataaaccgatcccgcaggaaataataccaagtagccaccagccgatgaaacttaaatcaaaaataaacaagtccatcttatggccatccatcaacttacggctggcactgatagcttctgtggcagtcggctcatgaccactatctagcatgtcacgcaagatatatggtgtcactgcatatgaataagccttgatcagccctggaataatcagtaaccaagtccacaaaataagaaaaatttcatataaaatataagttaaaaagttactcttaaagtttctggtaaatggactaaagatacctgaaagaacattttccttagtaccactatctctaaaatgcaagatagtataaattacgccccatgtgattaagccaattgcaactgaaactaccaaagtaatcagccatgcaaaaggattaactcttactttatctaggtacatcaattcagcattgttaccgaagcggcggacaataccgtacacgatatcttcgcccttttcaaaaaagttttcgatatcggtcaaaatataaacgattagccagccaacaaatgacagcaaaactgcccagccccagttaccacgtaactggtctctagcttgttcttttaattcttttcttgtagtagccattttctctcctcctcacttttctaatcatgagtattgtcgcctaaaatcagggcagaatcaattaaaagcacatcaaaaaagcctaattccaccaacatcggaactaggctcacacagtgttgaccgccactctgaccacatatagaagataacattttcgctaccggagaaaatgactactaatagcgacggtacatgatagattttagcattcaactacctaaaagacaagcgaaaagacgtgttgaattagcggaatggataccaaaatttacggataaaaaagacgaggtctaaacctcgtcttcttcattactaaaattcaagcatcatcgtcattgcacgattgatcttctttttaatctttttaaactcaccagaagcagtatgattatcctgcaaaatgatcatgttctggccatctttagttgcccgcataaaggtataatacccttcaccagcaccattagcagctttataatgctttaaattataaagtccaccattataatagctaggagcctgacccttgaacagaacttttctactcttgttagtcaaaatcttaccagcaagaatatactgcatggtcttagctaaatctgcgttagacattacgattgaaccagcacccagctcattgtgagcatccttaacggctttagcatggttcactttgacatattcaccctcacgcatttcatagcctggtacccaatgactagccaataacttagccttgtctgaccacaagaactcactatgggttagcttcagtggcttgatatatgtgtcatggaacaattgctcgtatgactttttctcaagcttggacaagattccacaaaggaaaatatagtttactgaagtatagtgccacttacctaatttgctagcatcaaacacagtatattgtgcatcatgcttgatgttcgcttcatcagagataaactcaggcgtacctaattgttgaccagctttcaaatccagccctgatgtcatatcaattaagttgctaatcttgactgaactagcaccatctacatttgggtagaattttgaaagtttatcgctaagcttcaactttcctttctctacctcatgcatcaccattgcagctgtcattgacttttgaactgaattgatcaaatagctagtgtcaggtttattgtccgtcgcataattaagcaaaactttgccatgatttattactaaaactgagcctttaacgcccacatggtcaatagcctggcgcactattccgcttttaaacggtctttattgcttaaatcaactcgtttaacgttatccttgttttgccacttcttggagtagaagtagttagacatatcatagtcataacgcttattaggttccttcatgaatggacgaacagcttgatcaactgcaacccagcctttccagcctaggtgaatagtatcttgcataaagtacttttcattgcctcgtcttgaaagatctgcaatattttcaaagccttgactggttaactggtgttccatcttagcaacagactcttggtacatcttgctagataaaccagtgtacttcatccacttgccattaattggtgggatgataaatagcacattagtgtgttgcttagcaaactgctccaacatcaattggaaatcaccatattctactgaatgtacatagtcaaaatcacgctgactacccttcaagcgtttcaataccttctttggtaaacgtgttctaaagaaggtattatcaatacctaagttgtttgagttagtgtgtatagcagcttgctctgctgcaaccttattcaaagcagctacagaatacttgttaggtaaaaccttagctctcttttgaatcttatttacacgatcacgcaattggaatgagctgaagaaattatcttcgttacgcaacattcgacgacgattttgtaaataaaatttttggaagctagtcaacttcttgccttgagcaatttgcttaaggctattcttgatctcgccctttacatttggcatttccaacagacgtttagctgcataacgatcagttttattattcttggcactaagcaagaaattacatgcttgcaatggtgaataatacaatgcaaaggcattaggatcttgaccccgcttagtaaaccattgtggtgaaatgatcacaacagccttcttgtttctaagctgcttagctgttccttgcatccccaagaactgagccaaagattgactacccggtccacctaataagaatggacggtagtttctatgatacttttccgcaattacactagggtgaagtgggtcgaatcttgacaactcacttgaaccatagaatggcacgtagccatcttcaaaagcttcctgcttcattgtgctgcccttgaagacagttgtgttttgtgaagctgcagcctcgtaaatcgtttgcttagaaaaagttctttcccaaggaataaggaaaacaactaacaaaaggataaaagcgcaaagaactgggccaaagatttgccacagccggcgtttattactcattttctaagctttccacctttgccacaatcttgtttggagtgtcccattcttcacggttaaattctgaaacaggaacatcaatatcaaacttttcttgcaagttcaaaagcatttgtacacttgccattgagtccatcaaaccattgtcaaagatgttttcatccatttggtctgataaatcttcaccagttaagtcatttaaaatatctaatacgccttgttttgtatccataattaatacctctcaaaaaacaactcaatacttattctacttccagccgaaccacagttgacttaggaaccctgagaaaatcaagaaactgaaacatactacattgaaggttaagaaaatggcgaaccatttagtaaacttgttagatggaatttgcttcttatgctttctcttgaatctaagccacatatcgttgatacaaatagctgaagcatggaagataccataaacaatataataccacgttaagccatgccagaaacccatgattaagaacaacaggaagtaagaaacttgtgataatctaattcgattcttaaacattttcttcttcattgcaaagaaagtgaatcgcatgtagatgtaatcacggaaccagaatgataaagtaatgtgccaacggttccaaaaatccttaatgttcttagaaataaatggcttgttaaagttcattggtgtatgaattcccataaagtatgagattgatacagcaaacaatgagtaacctgcaaagtcaaagaacaggtacatactgtggcaatacatgtaagctacaagccaccatgatagcttcaagccgccatttgcattaccaacggctaaagcagcagcactgatctttggtaacaaataagtgccaaagaaccaaccaatcacaaatttgtataaaaagccttggaataagtatctaacagcatactgcatatctgtaatgtatgcatcacgcgtaggtaccttatcataatcttttttaaatctgcggtaacgatcaataggacctgacgaaatagttgggaagaaaagcaagaatcttgcgtaagtaacaggatctactttcttaattgccccatcacgcatttccataataacttgtactgtcttaaaggttacgtatgagattcccaagaaaccaatgacaaagccaattgagttatcaggaaaagcggtcaaatatttaactgcggctaatggaataattgccaaaatcacagccaaactaaagatccaagtcttatttttaccgtggtgacgataatactgataagcaaaggttaaggcaaattcgtaaaccaaccagattaataggttaaccccttgctcccagtgatcaccatcaaaaatcaagaacaagaaaacaattgaaaaaattgcttcatatgtcttgagtcgatgaccgtaatatagcccaatgataattggaattaaagcgatcatcaaatagatgaaatattgcggattagaataaggctgtaagttaatgaaattaaaattcactacttattaacctccttaattaccgccttaatatctaccttaccattttgtgaaataggtaatgcatcttggtagatgtaacgctgtggaatcatgtaaggcattatattcttagctaagtcttcacgaatcatcttagttaaagcagcttcagaatactgacgacgaacgccttcttttaattcgatttcggcaacgatctgcttaacagtgtggtccttattgtacttaggagcagcaacgccataacggacaagcttgttcttagttaagtagaaattgatttcttcaagttcgattctgtaaccattgaacttgatttggaagtcaattcgaccgcgataaaatagcatatcgccatcaaagaaaccagcatccccactccggtagctacgatactcagcaccatcttcatggaaaaaggcagcttcggtcttttcaggattgttcatatatcctttagaaacactaggaccactaatgataatttcaccttcgccaggcttatcacccttagaagtatcaattgtaatcttagtgtcttcttttaccttaccgattggcaaacggtcatactttttaagaacttcatcagtaatttcaacttgagtaacagcaactgttgtttcagttggaccataggtgttgaaaatatgactatctgggaacttcttcttaagcatctcagcttcactgtgtggcaattcttcaccacagaacaagaaatgacttaagtctggatggtgttctgcatcaaaagtcttgtccaagaagcacatctgtgcaaatgacggagttgatacccaaacattgaactgcatctttggcaaagtttggaataatttaccaaagttttgagtaacatcatgaggcaaaactaccaacttaccagcagaaacaagtgctggataaagactcattactgacaaatcaaatgagtaaggtgcttgtgccaagaaacttggatgttctggcaaattaaagtctgacaactcccagttaacgaaactaagcaaattgtcgtgactaatttgtacacccttaggtttaccagttgtacctgaagtaaagataatgtagtagttctcatcaccttcaacgaagttcttctcgtcaacttcaaaattgtcgtcttcaacttcgctagccttaagaaccttaacatcagttaaatcaacttctggtaacggatcaatttccaaaactagtggtgacttagaaacgtcttgaatcatcgttaaacgttctgcgttagaatagctagcaattggaatataagcgtgacctgacttaacacaaccaagaaaactagcaatcatttcaaaagtttgtccgccccaaatcataattggagcatgctctggaatatctaagctagcaattttatgtgcccacgcatttgaacgctttttaaggtcaccatatgtattagtttcaccgagatagtcgtaaacaacacgatctggttcgtttgcggcgatctcatcaattttcttaataacatcttgaatcatgtgatagcacctaccttaaaattcattataaatgaagtgaacagatgttagtccactatattcatataaatagataagagccatcaggattccgaaataaacaattgttttcaaaacaaacataccaatacgtctgcctcgagaatcaaccttcgtctttttattcattttttctcctttaggtaatcttacttttgcctttgccctatattactacaaatagtggcaacaaacgcactaacggcttatattttaacaaatttaaactttttcttaaatcttcagttatttgtttcaaattgcgaatgcgttttctttactgttgtctcttgcaatcccgataagcaaaaaataatggaataaagataactattgccacaaaaatcaaagcaaagatcattaagcgccatacattctgtggtttagtccacattttactctttgccgtcgccaacaaaaatgccgcaaataaagcaataacaattacttcaaccaggcaaaaaattaaatgagtattttgccagagatataagtaggttgttgccggaaataaacaaaaccaccctgaaaagcgtaaaagaaagatttcttttttacgataatctactttcattatagtttcctttcctcattaactgccaaataacgcattaatattcaccgacaaaatccggtccataactacaatttctggtctggcgtagatcttagagcctgattcaaacacacatagtagttgtcccttataagcggtaatttgctctaaatatggcggcatggtaattaccagttctgcattcttttcgtctaaagcatttaaagctgaagttggaaaaacgtagagcttggaatcaccactaccataagattggctcaaaaaaattttattttggtaaattgcaattccttgaatttgcttatccattgaagtttcgccagttggatcggaccattgcagcgttccggtaacagatttaacttcattattagtaattgagccacgatttttaccactacgcgctatagtgtaagccgcaacttttcctcgaccatacatgttaaaaaagccaacaaacaattgaccatcataatatgtaacggtcgatgctttttcaactgcaggaatggcaatttgatatttatacttaattggtatttggctgccctctttataggcccttaattctgccattgaaaatgctgctagcgctgaagatttgcccattgagccagttatccagatatttttggctactggatcataagcaatcccacctaggtgtggccgaccaggtatttgaatcgttttaagatatttgcctgtcttcttatctaagacataaacaaccgaagcatgctcatgttcaccatcataagcagttagcaaaatatacttacctgcaaccgtaatcccctgtggtgtcattgcagttgctgtattgacctttttagttttaaaatcataacttttagtagcaactaatcccggcaaaacaaagtcttttccatcccacgtccgcggtggtacataattggcaactttattaataaaaggatatttttcacgcaatgctttttggtaattggcaaaattatgccaagcaggactagtgcttgtcccatccttagcaattttttcttttggccgttgacggatcatctcctgcttctgccaccattggtaaccgaaatagcctcctgcaccaatccctgcaagcaaaagcagtactagcaggaagcgcaaaattcttttaccaatttttttcaaaaaattactcccttctgtttaggaattgtccctattatgcaattcattataacgaaaaaacaattactttttgtttttaactccttgctataagctttatttactaaaaagataaatttttttgcaaaaaagtgctttcgtcacacttttttcacaaattaaggttatactagtaaatgtagtgaggaagaataatcctctactacaactcaacttttttgtttttcattcatactcctccaagtaaataatgaaaataaaaagaattgacttactccaattagtcaatttcatatctatccctttcggctcacgtgcgttgcgtgagcttttcttataccttaacttattctcaagcaaatctttaccttttcataataaattgaacacttttacttcacatttacccagtattatataaaccgtagcaagatggtagaaacttgctacaatactcccacttttttatttcattcttactcctccaaagtagatgaaactaataaggtccgcaaaaacttgcgggccttttcctttttcagcacttttttctgtataattaaggtagaaatgaggtgccgctatgttttcaccatcaatcaaacatttaatagaagaaaaatctggttcatttttaatccctgctagccgaattgcctttgtccaagcagacaatcctctttatcatgcctttttgattttgactaaggttaaatattcaaaaattccagttttagataaagaaaaacgagtcgttggcctgcttagtttggaaatgattacggacaagatgctgacgactgatgagatctccactgcccctttagataaattaaaggtcgaagatgtaatgcaaactaagtttgataaaataaacttcgttgaaaccaccctagaaacgcaactgcatctgttaatcaataatgctttcttgcccgttgttgatgatcgcggcgtgtttcagggactacttactagacgcgaatggattaaggcatttaactatgtagttcacacttatgacaaacactacgaaacaaaacgaataaaataacctccaagcagcctttaaggctgctttttttaactccaacatttattgagcaaaaatgtgtccagaccaataaagaatgttagaattaagcggtagacagatatgtttgtattttggggagggcaattatgaaaaatttaaaacgtcaatggaagtttattgtcgttttgattgctggtgcagttggattaattagccaatttgcattgcattcaaagagcctattctcaatcgggaatcttcaatttccagttcatgccatcattattgatatcattggtatcttgatggcaatttctttactattggaaattttccacgattggaagacaggccgttacggcgtagacatcctggctgttatcgctgttgtttctaccatattgattggtgatgtatgggctgaatggatgattttggtaatgatgaccggtggtgaaacgctggaagattacgcaactggtcaagccaacaaggaattacgtgccttgcttgataaaacgccacgtatcgccaacaagttagttgacgggaagatcaccgaagttaaggttgatgacctgcaggtcggtgatactgttttgatcaagccaggtcaacaagttcctgtcgatggtcaaatcgttaagggcacttcaagcttcgaccaatcttcattaactggtgaatcagttcctgtgaccaagaaccctggcgacgaattaatgtccggttcagtgaacggtgatgtagcggtagagatgaaggtaactaaggctgctaaggactcagaatatcagtctattgttgcgttagttaagtcttcacaagctcaacctgctaagttcgttaagatggctgaccgttacgccattccgtttaccgttatatctttaattattggtggtgtcgcttgggctgtgtctggggatgcaactcgctttgcggaagttatggttgttgcttctccatgtccactgttgatcgctgctcctgttgctttggtatcagggatgagttcaatgtcagctcaccatattattgttaagtctggtccaaccctagagaagttggctcgcgctaagacctttgcttttgataagactggtactttgactgaaaaccaattgatcgttgaccaagtcgttactgatgacaaatcatttgatcaaaaagaattgcaaagcttagctgccagtgttgaacaacagtcaagtcacgttatcgctagttctctagttaaggctactgacaaggatttaattcatcccgtaactaaccttaaggaaactaccgctcaaggtgttgaaggtgatgttgatggcaaacacgttaaagttggtaagttatcctttgttgcgccaggtcatgaaaaattaaacgtcacttcaactgctgtttacgtttcagttgacggtaagtttgctggttacatcactttgaaagataagatgcgtccagagagtcctaagactattgaacgtcttcgtcgtcaaggtgcagaagatatcatgatgcttaccggtgaccacaagcaagtcgcagaaaaggttgccaaagaagccggcattactgatgtccgctcagaacttttgccatcacaaaagattcaagctattaaagatgtgccaaagcacctacgtcctgtcgttataactggtgatggtgttaacgatgcacctagtctgaccgctgctgatgttggtattgctatgggtgctaagggtgctactgctgccagtgaaagtgccgatgctgttatcatggttaacgatatttctaaagttaacgatgcagtcgctatttctaaacacacaatgaaggttgctaatatcgatgttttaactgcaattggtgtcgttattatcattgaattgattgccttcactggtgttatcccagccttctggggcgctattttgcaagaagtagtcgacatgattacgatcagcttaggtttacttgctaagactaagccaagtgataagcaatttggtttggaagaaaaatagattagatgtgaagaagctccagaatcgatttggttctggagccttttttcatacataattatgcgtagcactgcaccagttcaatttgcatctaagttaaaaaactattaagattaaactcaactaaataatttttagtggttgggtttttatcacaataaaaactttcaagattcgcttctttgggtcaggaagcacttgaaagttttttgtttttttacagaaggggaaaatatgcattttttaggacaacttatcttaatcctcttaactacagttttgctggggcaattattcgcccgcttcaatatgcctgcagttattggacaactattatcaggaattttactgggaccagctatcttaaattgggttaagccaaatgatatcatcagtctattctccgagttcggggttattctgctgatgttcttagctgggcttgagagcgatctagatttattaaaaaaatacttcaagctaagctttactgtcgccacagtcggcgttatcctacccgttgttttcatgggcttagccagttacttctttggcatgcgccctcttgaagcactctttatcgggattgtctttgcagcaactagcgtttctatctccgttgtggtgctgcaagaagcacaccaactgcacacccgtgccggcacagccattttaggtgctgccgtagttgacgatatcttagccgtggttgttctgagtctattcactacattcagtcatgaaggtggcaagagcggcttaactaataactttttgcttaatatcttgattgaagtagtttacttcgtagttgtttggctgatttttaaatttgttgcgccatactttatgaaagcttctgaaaaaatcgacgttgactattccgtcgttatcggttcattggttttagccttaaccatggcttgggccgctgattttgttggtctttcagctgttgttggtgcatttttcggtggtttagcaattcgtcaaacaccacaatacaaagaagttcactcctctgtttccgcaatcggctactctgtcttcatccccgtcttctttgctgatatcggtctttcaatgacttttgccagctttttcaaggatatctggttcattatcgttatgaccgttttagctattttatcaaaattctgggccggaaaatactccagcgaaatctttggcttcaataagaatgaaggcaatatcgtcggtgctggaatggtatcacgtggtgaagttgcactgattgtagcgcaaatcggaattaaccaccatctcttccctgaggatatttattcaagtctgatcctagtaattatcgttacaacagttatttcaccatttattttgaattactttattaaaaagagtcaaaatagtacggaatttatgtagaaaaagtctagcattcgctagattttttaatagtttaattttacaagtggcttatcataaacgcaattgtgtctacatggtaaaatcaatagtgagaggtgagaaatatgttacaaactccaaacaatattagagctgttaccgctcgtgacctgcgcaataattttaagaaaattgctgatgatattaatgactatgatactaccgttatagtagctcgtcccaaagataaaaatgttgtgattatttctcaaaaagaatatgattcatggcaagaaacttcatatcttctaggaactaaagctaaccgcgatgcattagctgaagctaaacaatcatttgaaaaccaagatcaacgaaataaagttttaaccccagaagaattcgaggctttaactaaagatgacgaagcttaaccttaattttaactacaatgcctggaatgaatatcttgaatggaaaaaagaggataagaagacttcccaaaagattgataattttattaaagaatgccaacgccatccttttactggaaaagggaaacctgagccattaaaagcgaatttaagtggtgcatggtctcgacaaagtaatcataaagatcgcatggtttattcagttaccacaacagaattacaaatatggcagttaaaataccattattccaaatgaaaaagctctttcgagcttttttgtttaacccaattttcctaaatcgattacttggtcatacttctgcaactcatttgattcatagtggtgaattacttcaataaaggtaaggtttgagtttaacaagtaattatgaatttgatctgatgtcttcttatcaagggatgcattaatttcatctagtagcaaaatcgatctatcggccaaaattgcccgtgctagttctattctagctagctgtcccccagacaattgatccgcattatcacccaaggaatagtcccagcccttttcagcaataatttgatccaaacctaatttttggcacacctcgctcaccttttcccgggaaatatttgcacctaaagttaaattaaaccacaaggtatcggcaaaaattactggggactggctagcataagcgaataaatctgtaaacgagcctggcttttgctttttgtcgttaagcaatatttccttggcatgaccatgctttccggttaataggaattgtaataacgttgatttacctacaccagatggtccaataactgcaactttttgaccttttacaactgcaaagttaatttgattagctaattccttgccttttctagtaagatccagatcttctatttgcaaatttgcaaaattataattggtctctttcttttcaaccttgcccttggcaatatatttttctgccttagcgacaattttcttagttgttgataatttgtttcgatcttctaaaatagtcaaaattggattaagaaatgaatttgacagttgaacgattgcaaataaggcacctaaagtagtttgacccttaaccaccatgtaaattcccactaagaatggggttaagaacgtaaataaactagcaatcaagttaatccaagaattagtatctagattgagtaagttcattttacgcaaagcatcttctaattgattgatcaaaacttgatttttcttaaccgcattatcgcgcttgttgtataaatttaatgttgtgctaccagccagaaagtttttaatatgactaacatatttatcattagcagttgtccaattttctgctgcagtttgaatcttcttttgaaataaattagaaaccagcatcggcaaacatgaaccgattaaaaataataatacgcgtggtgctagttaaatcgttctaggcaatatgccatattataagctaaaatggctatttctagccgctgctgaaaaccagctaagcaaagaaaagtcgctctcaattgttcttctaattgccatcagttgatgatcgttatgctttttagcgcctttcatgtttcttcgatatggtgtccaaaggacatagcccataccttttaactcggcagttaagtcttttcctaagtagccttcatcgcctaaaagataatggttaattggatgagcattaatcatcaattctgtcgtttctttggcatcatgcactgatgctttagttcaagtacatagccatcatcgcttactagcgcgtgaaccttgaagccgtaataatagatttttttagtggctttctagccgatatcagctatgccacgaaagatcttgacgcgatagttgcggataggctgacaaactgggaaactgtcaataattaagaattctccagctgtttttacttcttgattccaatcttgacggatacagcgcattaaaggcaaaagcattcgtgcccgacgattaaagcgagaatgagacaaaccgacaaagaatttacaaaatcttctttgagattcgataccaatttcagtttgccaaataagcatcgctaagatggagctgtcagaaattttaacctgatcaacatttttacggtgcttcaattcatcaggagcacaaagcttgtacaaagaacgacaaattacatttaaccgagcaaagctaacttgtaaatggtgagaaaaacgattaagcttgagatagttcaattagatcggactcttttctatttaatttaagttacaacttgagtctaatccgattggacttttttattaactagcaccacgcgtataataatgtaactaaccaattaacacataaagcataccctagcgcaaaaacaatcatataggcctgcatcattatttcaatttcagcatcaaaacgattagtttccagcagcttaaaatctgtagtcaaaaagcctaagctagcagtattttcttcgctagtctgacccagcatcccctttaaaatgccagctcgcagcgtcgtattagtctcttgaatagcacttgtttttaaccgattgaaaatcagcgaagcaataaaagtcgcaataaacgccccaataacaataactagaaattgtgctaaatcgccaaaccttctttgcgtaccaacattggtcaatgtctgtaccatatatgcaaaaatgatttgttgtgtactagcaatcaagcctaaaatagttaacataatgaattttgcatgtgaagaatatttgtaaatcattttttgtcctcctgtattttacttgaggctagtatcgcaggataatgacgaaaaatgttagaaatttacagatctgcaaatcgaggtaaaacattatgttcaaatatggttcaatttacaaacaattgcgcaaagatcaagaaatcactcaaactgaagcctgcaagggtatttgttcaatctctaagttatcacgctgggaaaataatcaggtagaagttgagtttagcaccgccattgcattactcaggcgcatcaacattacgcttgacgaattcacgcattacgctgcaatgaaaacagaatttacattgccagacgacattataacggccattaaagacaatgatacaaaggtactcgaaaaatttgttcaggagcagctaaatcattatcacgccaacaaaaatattctcgaactcaaaaacatcattcttgtctgcaatcaattatttctcatgactggtaaaaactatctaacacctgcagacattaatcgaatcggttcatacctgcttcacaacaccgtttggtctaaatacaatatcttgctttttgctaactcaccgtttttgctaaattctaaaatcggctatcaaattgctctgcgaattattcacaattttcaccctacagaaagtttaaacgaaaatactactattttcatgggcggtttatctgatacagttattgccttagttttcaaaaagaagctagattacgctcaaaaaattcttaatgaattaaaaaagataggacttcccttctatctcatgttctttagttcaacattgacccttttacaaaaaattatcgactactgccacactctcaacgcacagcctgtattggcaatgattgatgccatagttcagctaaattgcatggaagttgctaaaaaatggcttgagatttttaaagacgtacaacaaatctggccagaaaaagaaaattaaaaaccgtaaaagtaatttactttcacggcttttgacatggtattcattatgcaagcttacaaatttttagcttttaattaatccttaacaacgtctttggtgttcaaccattgactcttgttgatcttaacgatcttcttgccagcagctttcttaacatccttagcggtgtaagttgaacccattgaaaccttttggctagtcttgtgaccttgtgcgtccaaaacattaactttttggttcttagtgtcctttacagcaacaaagatcttgtcaccctttttaattgcaggatcagttggcatagtttcggcaacacctaactttggagcagtaaaactagctgcttgactaactgaagcaccaacacccattaaactcattgaagcaactgcgattgaaacaactttaactaaattctttgaaactaacataatgaatacctctaatttctatatcacttaatttgttggaactttttgttccctcattccttacgtctttattgtataacatatgttattaattacaaggggtttatcgaattttttaaaaataattcagtcgtctcaaagtattgctataataacgattgcggggattttttgtccaaaagcattaaaaaagtgtctgagaaaccgttctttcccaaacacttttttaagcagctgctacttcgtttgaattttgagtcacttttctagtttttaaactgacaaaaatcgctacaattagtgttattacctggattactaataatgtaaccaaagcaacagtaacattgaatgaaccagaaattgtggttaatactgttgtcataattggagcaacagccattaagattgtatttaataagccaacagttgaagccaagattttatgatcaactgatgttactagccattgctccattttaactgaagcaactcctgcaatagctgccaagaaaaacattgttatcataattacgtaagtatttcctaggaaaatgcttgttgtagtaacaatacttaaactggcagaaataattactaaactaaaaactgttaattttttgaataattgtggtccaaacattgaacccaatgcaaagcctgcgccaataaccacaccaaacaaagcaatagtaaagctataagtgccgattagcatagttgaacgatgagctgcaagtacaattgttgtcaatggagtaattgtatctaaagctccatttaataatgcgattactaataccacagtcaataatcctgattgtttcttcacttgggtcaatgaagttttcattgtttggaaaaagttttgatcattaacttcctttttttcaagtggcttctgatccttctgatgttttaagccaacactggcaaataacaaacctgctaacaagaaagtacctgcattaacaaaggctaaagttgagtatgacattactagcaaaagtgctgaaccaatgaattgagcacccatactaataatttgatttacgccgccattaaagcctactgcattcccgtattcttttttaccaacaatatcaacaattaatggtgcaaccaagccacctgaatatgaaccaatagtatctgataagaaattcacaacaacgatgattaaaaccaaattccactgtgacattttagtgataaacaataatcctactaaaccatataagataaatcggacaaatgctgctaaaaagatattgcgaaactttttcttagtcttatcagcaaggtaaccaccaaagatctcgaataattttggaactgattcagaaattgcaattaatgaaagtgctaatgagtagttttgtaatttgctagcataagtcatgaaagccaagtagaaaagaatatcgcctgcgcctgaaagaaaactagctactgaaaatcttctaaagtctgcgtttttaagaaatacgttcataaatcttaccccctttttctttgtttcgtttgttgttgaaattataataaagtgaaaaagaaattaattttaaaaatggcgtattcgacattcggaggataaacctatgacaattggtgaattactcaaagaaaaaagactagcagaaaacaaaactcaaaaagcatgggttggtcatattatcagtacttcttattatgctaaagttgaaaagaatattcatagaattacagcagaggatttattagccattcttaaacataatgatctttcaattactgactttttcgaagaattagcagacaaaaaggatgaactaaaagcacaagtaaactcgctaaataaaacagtaattgatgctgtttatcattctgatgtttccaaagttaatgaagtcattcaaattattaaaaaaatggatctaccgactaagcaaaaacaagaacttatcttaatcaataaggggtttatcgaaactatcaaaaatgatctaagtgacaattatcagccagataaaaacatcgttcaacaactaaaagacaaaatttttagtattcctaattttaatagattcaaacttgaactctatactaatttcatgcaattttatgattatacaactaatattatgatcaccaaacaagtgatccataaaatagatcagtttaagagcgataaagagttattagcaatcgctggtattctattcaatctcctttcacaattagtcgaagaacatcattatcaagaaactgcaccatttatagcagctagtgagcatttaccctttttaccagacttatactttcctcaaaccggaatctcattgctaaaataccttattagttatcattttaataaaaaaacagcagacttagctaaagctgagatgattgcacaaacttatcaaattactggtctagaagactttggtaaaggtgcacaagaaattattaatgaagttaaagaggactagctttaagctaatcctcttgtttcaatctctaaataaaacctaacgcgttatagcacatgtgcaccaaaattgaatagcgcaaatctttggttgacatatagacccaagctaaaaccatgcctaagacccaatatactaagatatacttacttaatgccggatcatgcatatagccaaataaaaatccgcttgcaacaatacctagccacttatttctagtatttttcttagtgaaaaagatattgaaaaacatccctctaaagatatgttcctcacaaaatggcgcgatgaaaactactaggatcctaaataaacctgcattgtattccgctattttattcaagctttcctggttctttgaaacgccgccaccaactagattaagcatcacaatcgaacctactacaatcagtacaaaaccgatcatcgctattccgattctgcgccagtcccagtgtggtgtttcatcaaagccccaatcattttcttcttttaattgcctgcgataaatataggaaattgcaaacaaaactattaccgtagcaagcgccgtaacgaagacgcgatattgcgccaaatcaaatcgctgaggtctaaagtaaagtacttctaattcagaataaattaccaaagccaacacagcccctgcaatatttcccaggtaatgtccaaatctcttcatttttcattcacaccttgattctttcaactagtaatcattgtttctattataatgtaaataagaaaaaatacctaaggaggagtatctatctatgcttaatcagatcatcgcttttttggggagacgcggtgagttcttctacatttcagtctttatgttactgatattttttgcctttttaatctcttggcttatcgaaccaagacgtttgattaatggcgttttgtttactatctttatagtctcaatgctctcttggatcaccgttatggtgcacaaaagtacgagtcacggcttgcaacgtgcctatgacctactagttctagctgcattatttggcattgtcttattattaattttcgcctggatttttctattctggaatgcctatttcgtttggaaatatgaaagccatactttgcctaacttgcttactttaattaccggatttttagcattaattattagtattatcgtgctcttaggaccaggtaagtacttgccacgttggcttagtctcgcattagcttcaattcccgcgattgcaatttatttgggattggtgctttacaactttttggtaaacttgcttctatatcaaatttatcctcgtacctaccaccaagactatttaatcgttctagggtctgggctaatcaatggcgaccaagtatcaaaactgcttgcggctagaattaatcgggcaattcaatactctaaccgccagtatcaaaagggccgcaagcgccctatcctgatcatgtcaggtggtcaaggcgctgacgaaaaaatctctgaagcactcgctatgtctcgttttgcacaacggcgtggcgttagtgttgaccgtatcttattagaagatcaatcgaaaaacacatacgaaaacatgctcttttctaagcgtattgccacaaaagattttggtaattcccacttcagggcacgcttctttagcaataattaccatatttttagagctgctctcttggctaaggaagttggtttaaaagccaatggtgtcggtgcttacaccagattctactacttgcctaacgcaattatccgcgaatttgccggtgtgtttgtcatgcataaacgccgtcatttcgttatcatgggattaatcgttttattctttatcctgcaagctatcttagtcatgacaggattagaaagatttactgtaatttagaaaagagggatgcaatgcttcaactaaagcatatttttaagtcatataaggtgggggacaacatcacccacgctttagacgacgttacaatctcgttccgtgaccaggaattcgtcgctatcttaggtcctagtggttctggaaaaactaccatgttaaacgtaattggcggacttgaccgttacgaccaaggtgacttgatcatcaacggcaaatctaccaagaattttaaagagaccgactgggatgcttaccgcaacaataccgttggttttgtttttcaaaattataatctaatcccccacttgtcgatcatcgccaatgtggaactagggatgaatttgtctggtgtgcctaaaaaacagcgccatgaaaaagcaattgcggcgttaacagaagtgggattgaaagaccatctaaataaacgtcctaaccagttgtctggcggtcagatgcaacgagtagcgattgctcgagcaattgccaacgaccctgatattctactttgtgatgaaccaactggtgcacttgatactgagacttctgtccaaattatgaagttgatcaaaaaactatctaaagatcgactcgttattatggtgacccacaatcctgaattagctaaagaatacgccacaagaatcgttaatttccaagacggtaagattcgtcatgattctgatccttttagccctaataaggaagaagacaaatttaacctcaagcgtaccaagatgtcttactggaacgccatcaagttgagtttcaccaatattatgacaaaaaaaggtcgaactctgctaactgcttttgcttcaagcatcgggattatctcaattgccgtagttttagctatctctaatggttttcaaaagcaaatcaataccacaatgagcaaagctttagcaaaatatccgatttctatttcacagaccgcaactgacattacttcagctaatgcacgtaaagaatcggataaaaatgtcaaaaaccgcggctatgtaacggcagaacaagaccaaagcgaacaggcccaacacgttaataaaattagcacaaagtatgttaactacatcaagaagatcaatcctaattatgccaataacgtgtcttaccaacgcggcgtaagcttgaatttattagctaaaaacaagggaaaaattgaacgcgtgcaattttcaaatacggatcctgatcagactaattctgttctagctgctagatcccaagcgatgagttcaatgggactgggttcaagtgtctttcccactactttaaataaagagaaagactcatttttgaagcaaaactatcaattgctctcaggcacttggcctactaaggcaaccgacttggttttagttactgacaataaaaatactgttaacatcaatgccttaaaaaatcttggtttcgatttaaagaataaggaacacgtcaaattcggccaattagtaaataagcaatttcgtgtagttgctaacaatgattactatcagcaattgccaactggcatgtttattcctaaaaaggtaaataacgccatgtataacggtgctcaaaccaagctaaagattgctggtgtcattcgtcctaaaaacgaagattcaatggccttgttatcaactggaattgcttatagcgatcaactttcacaacgcgtgattaatgaaaataaaaactctgcaattgtaaaggcacaaaagaagagtaaccatagcgtattaactaaccaaaaactaaatgccaatgaaaagaaagctacaatgcagactcttggcggtaccagcatccctactggtatcatgatttatcccaacaattttgatgataaagataaagtacttgattatcttgacaaatggaacaaggggaagaaaaaatcagacaagattctctatactgacatgtcaaacgctgttaccacaatgactggcggcctcttaagcgggataacgaccatccttgtcgcatttgctggtatttcattaatcacatctatgattatgattggtattttaacttatacctcagtacttgagcgaactaaagaaatcggggtactcaaggcattaggtgcccgtaaaaaagacattactcgtgtctttgatgccgaaactttcatcctaggtgttttctctggtgtattaggcattctgattgcttacctactaacattcccaattaacagtatcatttacaagattactgatctggcaaatgtagcccaactagatcctactgctgctattgttttgatcattatttcaactatcctcaccctcttaggtggtcatattccagcacgaatggctgcaaagaaagatgctgcaattgcattgcggagtgaatgaatttaataaagaatttgttacgttgttcacaataacctaaatttttagcaaaatatgtggtatcttagctttagcaaaaacaagtaagaaaggaacttttttcaccatgactgttaaaaaattagaaaataacagcgatgttaatgtagtggcagaagaaagcaaagttttaactgatttattgaatgaatcaactaagcaagtaatcggtcaagcagctttcgataagatccaaaacttaattaaaatctctgccgccaaagattatcaagaacttgaaaagcaaattgctagtcttaacaatcgcgaaatgattgttgttgcacgttattttgctactctcccactcttgatcaacatttcagaggatgtagaactagcaagtaaagttaatgtgcttaacaatactcatcaagattatctaggtaaattgagtgacacaattgacattgtagcccaaaagaaaaatgccgaagaaatccttgaacatgtaaatgtagtacccgttttaactgcccatcctactcaggtacaaagaaaaaccattttggaattaaccgatcaaattcatcaacttttgcgcaattatcgtgatgtgaagaatggcacaattgatcgcgatgaatggactgaacaaatgcgggcttgcattgaaattttgatgcaaactgacattattcgtggtcacaaattaaaggtagctaatgaaattaccaatgttttggcttactaccctaaggctttaatccctgcaatcaccaaatttactagtcgttacaaggaattagctaaaaaacacgggctaaacgctagtcatgctacgccaattaccatgggaatgtggatcggcggcgaccgtgacggtaacccttatgtaacggctgatacgctagaactaagcgctactttgcaaagccaagtaatctttgaatattacattaagcaaatcaataagctttatagagccatttccatgtctacttcttatatggagccatctgacgatgtaatgcacctatctgagctttctaatgatgattcaccattcagaactaacgagccatatagacgggcattctactatattcaaagccgtttagtgcacactgaacaaaaattactgaatattactaacaagaacactttcttaaagaaacgtgacctccaaaatcttgataaaatcccttgttatcaaaatgctcaagaatttaaagccgacttagaaatcatcaaaaattcacttgaagaagaccatgatcacgccgtagtagacagctactttactcaaattcttgaggctatcaacatcttcggcttccatctagctacaattgatatgcgtcaagattctagcgttaacgaggcctgtgtcgctgagctacttaagagtgctggaatttgtgacaattatagcgatttaagcgaagacaaaaagatcaagcttttactcaacgaattgaacaatgatccacgtaacttacacgccaataacaaacccaagtctgagttactacaaaaagaattaaagatctacaagactgctcgtcaattgaaagaccgtttgggtgaagacgtcatcaagcaacatattatttctcacactgagagtgtttcagacatgctagaacaagcaatcatgttaaaggaatacgatttacttgataatcaaaaagcccgaattcaagtggtaccactatttgaaacggttgaagacttgaataatgcccgggaaataattaaggaattcttaagctttgatatcgtcaagaagtggcttgtttctcaaaataattatcaagaagttatgttaggctactcagattccaataaggacggtggctacttagcttcatgctggaacctttataaagctcaaaaggatctaactaagattggtgaagaaatgggtatcaagattacctttatgcatggccgtggcggtaccgttggtcgtggtggtagtccatcatacgaagcaattacagcacagccattcaagtcaattaacgatcggatgcggatgaccgagcaaggtgaaattatccaaaacaagtatggtaataaagacaccgcctactacaacctagaaatgttagcttcagcaacaatcgatcgaatggcttctaagcaaattgttagcgaagatcatgtcgcagatttccgttcttcaatggatcaaatcgtagctaaaagcaacgaagtttaccggaaactagtatttgagaatcctaacttccttaagtacttcttccaagcaactccaatcaaagaaatctctggtcttaacgtaggttcacgtccagcttcaagaaagaaactcactgacttttctggcttaagagccatcccttgggttttctcttggtcacaaagccgtgtaatgttccctggttggtatggcgtaggttctggtttcaagtcatttatcgatgctgatccagccaacttgaaggaattacaaaatatgtaccaaggttggccattcttccactccctgctttccaatgttgatatggttttatctaaatcaaatatgagaattgccaagcagtatgcggatctttgcgaagatgaacaagttaaatcagtctttgatatcatcaatcaagaatgggaactaactaagaaagtcatcctacaaattgaaggtcatgatgaattaatcgaagatgcacctactcttaagaagagtctggaatacagaatgccttacttcaacattttgaactacatccaattagaaatgatcaagcgtgatcgtgaagatgtgattcaaggtgtttaccaaagtattattccaattactatcaacggtgtggcttccggtttacgtaattcaggataaaaaacacataaaattcagctaaaaaaggctcctcattgcctgttttatcaagcatttgaggagctttttttaatttattaaactttttagttacgcctttttcataactaagttaagtggcgttacaattactggaacgacaatggctgtaaaaattgcttctactaaaccgttcatgcccagtgccataattaaaattaaaatcaatggcgtacctgaactataatttcctaggtaatgagttaagcttgctggatcatgcatgaagaaaatactcgtcagcaaaataaccatcacggtattagttaacgaagtgactgctccacttatgatataacccaatttcgcatatttagtcttactcatacccttcgcaataattcccgggaaatagccagccaaaatacttggtaccaatgaaattaccggattttggaacaacattaagctgaccatatcgccaggttgagtatatgcaacaatcaatctggtaataccccagaataagccaaagcctagacccgccttttgtcccattaacgtgccatagacggcaattgtcattggaatagtagttacagctggcaaagccgggataattcttacatagccaacatttggcacaaaagtctgtacaatcaataaagcagcaaagacagcagtaattgctaatcttttagtttcttctcttctcatatatttctccaacttaattctttagactcaattaaaccataattaagattttttctcagcaaaaaagtttattatacaatatctaggtatattttatctaatatgacaagatattgtatttttttattatttttttacttaattatgcattatccttactctctctaatgcataatcgtgttctataccaattaagaatccctttatatcaatactttatgttgtatgtcaattttgacatagccactaaatattgttaatctcgttttgtgttaaaaatcatttgatggagagaggatcaattttatgaataaaaaagtcaaaaaattactatctattggtgtgcttgcattgagtttaggtgcaattttaaccgcctgctctggtaaaaaacagggtgcaagcaataataaatcaagcgatgccaagcactctattgcattaattactggcggtaatggtgtaaatgataactcttttaaccaatctgcttgggaaggatttcaaagttatggcaaagagcacaacttgagccgcggtcgaaacggttatcaatattttcaatcaagtagtgctgctgatttcactcctaattttgatcaggcagctaaagctggttatcaaactatctttggcgttggttacagtttaaaagatgccgtagcttctgccgccaaacgctatcctaaaaagaattttgccattattgacgatgtaatcaagggacaaaagaatgttgtctcagctaatttcaagagcgaacaagcttcctacttggctggtgtcgtagctgctaaagaaaccaaaaccaacacggttggcttcatcggcggtgctcatggcgatattgtcgacctttttgatgccggatttactcaaggtgttaaagatcaagccaaaaaaatgcacaaaaaagttactatcttaaaccaatatattggcaactttactagttcagacaaggccaaatcaattgctcaatcaatgtacaccaaaaaagccgacatcatcttccatgctgctggtggtgctggtgatggtcttttccaagaagctaaagccattaatcaaactagaccagctaaagataaagtgtgggtaatcggagttgatgtcgatcaatctcatctcggtaactacactgctaaaggtgggcaaaaatctaattttgttttgacatcagtaataactggagtaaatgttgctgtcaaagatatcgccaatagagcttataataataaattccctggtggcaagaatttggtttatggacttaaaaacaatggtgtttctattgaacgaggacagatttcagcttcaacttggaaagatgcccaaattgctagagctaatatcctaaaaggcaaaattaaggttgccattcatcctaacaataaataaaagcatactagtatagtttgctttttataattacaatcaattattttttgcctgatcaatatttttgttgacaaaataccgaacaattaataaacttatttataaattgtttggtattaatattgtggaggacagaaataatgaacgtaaagttcaagaaaattttatcatttggtgtcgttttagcatcagttggcttgattctaactgcttgttcgggtaaaaagtctggtcaatcagccaacaaagatactaaacatggcattgccctaatcacagatgaaaatggtgttgatgatcattcatttaaccaagctgcatggtcaggatttaaagcatacggcaaggaacatggtttaaaacaaggaaaaggtggttatcaatacttccagtctagcagtgccgcagacttcactcctaactttgatcaagccgctacagccggctaccaaaccattttcggtgttggctatcaattagccgacgcagtcaagcaagcagccaagaagaatcctaaaaagaatttcgttatcattgatagcgttgactctgggattaagaacgtcgcttctgcaacctttgaaagcaatcaagcttcttatcttggcggattggccgcagcttacaccactaaaaccaacaaagtaggtttcattggcggtgctaagtcatctattattgatttattcgaagccggttttaagcaaggtgttgctgacggtgctaaagctcttcacaagaagatttcagttcaaacccaatacatcggtaacttcacttcaaccgataaggctaaatcaatcgctcaatcaatgtatgctaaccgcgctgatattatttaccaagcagccggtaacgcaggtaacggtgttttccaagaaggaaaagattacaaccaagcccgtccagcagctaaaaaggtttgggtaatcggagttgacgttgaccaatctaacctaggtaactacaagtcaaaagatggtaagaaagagaacttcactttaacttccgtcttaaagggcttagatgttgctactaagtcaattgctaatgatgcttacaatggtaaattccctggtggtaagcacttagtttacagcttaaagggtaatggggtttaaatcaccaaaggtaatttaaacgctaaaacttgggcagcagtacaaaaggctcgtcaacaaattattgatggcaagatcaaggttgctactgctccaactaagtaattcagctgcttagtattttgagaactcttcgttttttagcgaagagtttttctatagttaattaaggaagtatttatttacatgaaagaacagagaaataaagtaatcgagatgcgtcatattgtcaaagatttcgatggtttcaaggcaaatgacgatattaaccttacgctctatcaaggtgaaattttggctttgcttggtgaaaatggcgcgggtaaatctaccttaatgagaattttatccggcttgcttgaaccaacaagcggtgaaattctggttaataatcaaaaagtaaatattaaagatccaaccgtcgctaaaaagttaggcattgggatggtacaccagcacttcatgcttatggactcatttaccgttttagaaaatattattctaggacatgaatcaactaaaggaccagttatcgatctgaaaaaggcaagaaaacaggtcctagctcttgcacaaaaatatggctttgctattaatccagatgccaaaatctctagcattactgtcgcccaacagcaaagagttgaaattctaaaggtactttatcgtggtgcagatattttaatttttgatgaaccaactgctgttttaaccccacaagaaatttctgaatttattaaagtactcaaaaatttagctaaagaaggcaaatcaatcattttgatcactcataaattagaagaaatcaaggctgttgcagatcgagttacagttatcagacgtggtcacgatgttggtacttttgctgttgatcaagttagtgatgagcggttagccgaattaatggtggggcggcatgtcaacatgaagctaaccaaaccagcacctaacttgggcaagcaaattctagcaatcaaaaacttacaggtaaaaggaaatcacggtgccttaagcgttaaagacctttccctttcaatccgtggaggcgaaattttagggctagccggaattgacggcaatggacaagatgaactggttgaagcaatcactggtttacgccatgttaagtcggggcaaatcttaattgatagtcaaaatttaaccaaccaaaaagttcgcaaaatcaccgaagctggcgtagcgcatattcctgcagaccggcaaaaatatggtttaattcttcacatgtcattagctgacaacttagcgctgcaaacttactaccaacgtcccttctctaatcatggcatcattaatcatcaagcaattttgaagcatgccgtagatttaattaaaaaattcgatattcgaactactagccctgcattgccagctagcgacttatcgggaggtaaccagcaaaaagcaattatcgctagagaattaaatagaaacagcgatctaatcattgcattccagcccactcgcggtttagatgttggtgcaattgagtatattcataagcagcttttagctcaaagagcagcaggaaaagctatcctattaatttcatatgaacttgatgaaattatgcaattatctgaccggattgctgttttgcatgatggtcaaatttcaggcgaagtattacctgaaaaaactacagatcaagaactaggtcttttaatgaccggtgttaagaaagaagatgcaacaattgattaaagttacacctaaagtcaaaaatattctagtaccagttatctcagtaattgctggttttatagttggtgcaattatcatgctgatttggagttataatccttttcaagcatacagctccatgttctctagcgcactgggcaatatgaatggtattggtgaaactattcgtgaagctacgccattaatttttattgctatcggttttgcaattgcctcaaaagctggcttttttaacatcggtttgccaggtcaagcacaagctggttggttgacttctatttggattgtattggccaatcctcaattgcctaagccagtattattgcctttagctattattgcaggcgctatagctggtgctattgtggcaggaattgctggctatttaagagctcaatttggaactaatgaagtaattactactatcatgcttaactatattgtgctctatacttgtcaatatttaatgcaacaagtaatgtcctcaaaattaagaattgataccgatactaccaaaacaattccagccaatggcagcttaaagcttaactggttaactagcatgtttggtgattcgcgaatcaatgctggtattttcttagcaataattggacttattttttattggtatttaatgaaaaaaactaccgttggttttgaaatcaaggcagttggactcaatccttttgctagtcgctatgccgggatgtcttctaaaaagaatattattatttcaatgttactttcaggtgcattttctggcttaggcggtgtagtacaaggacttggtacctaccaaaactacttcactcaaacaactagtttggatattggctgggacgggctttcagttgccttacttggtggtggaactgcaattggtattttattagcttcacttcttttctcaattttaaaaattggtggtttgggcatgcaaactattgccggtattccttatgaaatcgtatctatcgtaattgctgccatcattttcttcatcgctatcaattatgtcattggtttgctttttaaaactaagaagaaccgcagtgattactacattccaaccagaaaagaaaaaggacccaacaatggtgttgatggtccaggtagaaaagtaatcgaaggagaaaaataatgaatttcgttacaatgatggcgttaattgtttcatccactttagtttattctgcgcctctaatcctagcttctcttggtggtgtttacagtgaaaactctgggattgttaatattggcctggagggtatcatgaccatgggagcctttgcggcgattgtcttcaacctaactttcgcttcaacttttggtgcagctactccttggcttggcactctagtcggcggaattgttggtttgattttttcattgcttcacgctgttgccacaatcaattttcacgctgatcatgtcatttccggaacagtgctgaacatcatggcaccacctttgggtgttttcttgatcaaggcaatttatgataaaggccaaactgaaaatatcaccgctaactttggctacttcagctttcctggtttaagcagcattcccatcgttgggccaatcttcttcaaaaacacctctgcccctgcttggattgccattattcttgctattttgatgtggtggattttatataagactcgctttggcctacgcttacgttcatgtggtgaaaatcctcaagcagctgacacaatgggaatcaatgtctatggcatgcgttatgcaggtgtattaatttccggctttatggcaggtcttggcggtgccgtctttgctcaagcaatatctggtaacttctctgtttctactatcgttggacaaggattcatggctttagctgccgttatatttggtaaatggaatccaatcggtgcaatgctctcatcccttttctttggttttgctcaaagcttaagtattattgggcatcaactgccaggaatcgatcaaattccatccgtttacatgcagattgcaccttacgttattacaatcatcgttttggtcctcttcctcggcaagtcagttgcacctgccgcagatggggttaactacatcaaatcgaaataaggaaaaaaggttgtttcacatgaaacagccttttattttacacatgtccacatagttatccacaagatatagcacttatatgtggtagtcttactatatcttgtactaaataacagctatcggcgttttctcagttggcattggaaaatcactgttaagcaatctaagctcatcatctgtaagtttaatcttttgtgttgcaatattttccttcatgtgttctacactacttgccttaggaatcgttaaaacattgccattgcgcatcgtccaagctagcattatctgatgaggcgtaacgccatgatcacgtgcaacaattttcaaattacgcgtaattcgaattgtgttgcccttgcctgaattaaatggtgaatacccaataaagtttacaccgtgctcttcttgccaagcttgcagatcaaattctgtcccacgttcactgatattgtataagtcttcattagcaaagcattcttctccacctggcactgtaaaaagctcctgcatatcagccgtatcaaagttagatacaccccaataacggatcaagccatctttttgtaatgcttgtaagccgtggatcgtatcagacaagcgatgactgccccgccagtgtaatagataaagatccagatgatctgttccaagacgttttagactggcttctagactctgacgttctagttttggcgttgcatgataggggtagaattttgaaatcaaaaataatttttcgcgatcatatcctttaatcgcttcaccaattagctcttcgctttggccatccccatacatttcggctgtatcaattacactcaggccatgatcaaggccatagcgaatagctgctatttcatcttttttctttttaggatcttcacccaaaccccagctaccaattcctaaacctgttagtttttcaaaattcatcctcgttcacttccttatgttcaaattttaacataattgattcgtaattatttttatcaatcaattgacaaaatggtctattccattttataatggactagaccaacaaatgaggaggacttaattatgaaagttattgttaccgaaaataaaattcaaggtggagcaaaagcatttgaaatttttgaaaaaggaatcaagaacggtgctaaagtcttaggtttggcaaccggctcaacccctgaaacactttaccaaaactgggtaaaaagcgatcttaactgtgaaaatcttaccagcattaacctcgatgaatacgttggtttaaccccagataatcctcaaagctaccactacttcatgcaaaagcatttatttgacaagaagccatttaagaagacttacgttcctgacggtatggcaaaagacgttgatgctttttgtaaagaatatgatcaaattatcaaagacaatcctatcgacattcaactattaggaatcggccgcaatggtcacattgcctttaacgaaccaggcactccattcaacatcggcactcatgaagttaagttaaccgaaaatactatcaaggctaatgctcgcttctttgacagtatcgatgaagtgccaaagagtgctatctgcatgggtactgctaatattatgcaatctaagaagattgttttgatggcttttggtgaaaagaaagctcacgcaatcaagaaaatgattgaaggcaaagtcactgaagaagtacctgcatcaattttgcaaaaacacccagatgtaacggtgatcgtagacgaggctgccgcacaagaattagacgacaaatacaagaactaaaaacaataatttaattatcagcatagaaaaagctaggctttctacaatcgtggaagacctagtttttttatttagcagcctgtatctacaatgaaatatacttcacaaaattgcatttttatataaaaaatgaagcataattcagttttttattgaattatgtttcattcctattcgattttttatttctacccttgacttttagatgtgaaacataatcaaaaaatcacttgtgtgccacaacatatcgtattaaacttaataattgtctacatatggtatttaagaaagaatgtgattcaagttattgttttaagtgggccaattggagccggtaaatccagtttaaccagtattctagctgaacatttagggactcaggcattctatgagggcgttgataacaatcccgtattgcctttatactacaaggacatgaagcgttacacttttttgcttaacacttacctccttaaccaccgtttagcacagatcaatcaagcaattcaagaaaaaaacagtgtctccgatcgttctatctatgaagatgcactgttcttcaagatgaacgccgatagcaaggtcgctgatccaaccgagttcaagatctacgatgacttactcgacaacatgatggaagacactcctggcaatccaagtaagaagcctgacttactgatttacattcatgtctcccttgatactatgcttaaccgaatcaagaagcgcggtcgttcatttgagcaaatcagcactgatccaggtttgaaagattattacgcaagacttttaaagtactacgaaccatggtatgaaaattatcatgcctcaccaaagatagaaatcaatggcgacaaacttgattttgttaccaacatggatgcacaaaaagaagtacttaaagaaattgatgaaaagttgcatgaaatcggcaacttataagaaaaagaaggaacgtgatgacagttattgttttaagcgggccaattggagccggtaaatccagtttaacaggtattttatctaaatatttagggactaagcctttctatgaaagtgttgatgacaatccagttttgccacttttttacgctgaccctaaaaaatatgcattcttattgcaagtatatttcttgaacacacgcttccacagcattaaagacgcgctcactgaagataataacgtcttagatcgttctatctatgaagacgccttattcttccaaatgaacgctgatatcggccgtgctacttctgaagaagtcgatacttactatgagttattgcacaatatgatgggcgagttagaacggatgccaaagaagaatcctgatttgcttgttcatattaatgtttcatatgatacgatgatcaaacgaattcaaaaacgtggtcgtccctatgaacagttaagttatgattcaactttagaggactattacaagcgtctgcttcgttattacaagccttggtatgagaactacgattactcacctaaaatggaaattgacggtgataaattagacttcatggctaatccagatgataaagaaaaagttttggatcaaattacagccaaactaaaagagatgggcaaattacctgaagattgggaaaagcctaccgatattcaaattgaagcataataaaaaccattcatttgcgaaattatcgtatttgaatgattttttgtttacagtgaatttttcgctttattgttgtataatttgaaaaaatgtgtttaaaggaggagtttgaaaatgatgttaaccgtaactggtggacaatggtttttcccacttgtcataatttgtctaattttgggtattgtcgcaaccatcgctcaaaagaaaaagctgactaaactaaaaagaataaccgataactttgcctatgcaatattagttattctcttaatcattgaatggattctatattttcaaaaacaatttaattttattactccagcaatctacacccttgttgtcatctatcttattggacggcaattactaatcagataccgttcttctctattgaaaaaattaggggctaaatataagcaactgacaattggacttgctactatttacattattttagttaccttattgcttttaatcggatctaaattttcaactatgggctggatcattgctggattagttatcgtagcctttggcttcgttagctacatctttgaaaaagacaaacaataatttcccaggaaataataactcgcatagagcttctatgcgatttttatttattcaatttttgctaatgccttcgcaaccccatcatgattgttatcagcagtaatttgttccggagcaaatttttgttttagttctgctggggcattacccattaaaaatggataccccacttcttccaacatatcttcatcgttatagttatcgccaaaagcaatgcaattttgcaagtctacgccatattcttgagcaactattttgactgcactagccttgcttacaccctttaaaacaaattctaataaattctctgctgatctaacaaaagtcaaatcaggatatttagcagttaattcttcttgcatacgatcaagatccgctgaatctcccataattagacctttatgcacgccctgcagtttttcaagttgattaattgtagtcggtgttgcttttacatcgacaattctttcttcatttttaacccgtgggctcttttcttcactacaataccaaacatagccactatagatattccaagctgcatcattatcttgctcatcaacgtagcggcaaatttcagctgcttcttttgcattaaaaaaacggctgattagtactttgcctgtttcatcaagggctaaagcaccgttatacgcgataaacggacaaactttcaaaatttgattaaccactgtcatcatccctttaggaagacgtgctgatgcaggaacgaaaatattaccattaataatttgtctacgaattgcatcccgcgttgcggcggttacctttaaatcatcattaattaatgtgccatcaagatctgaaaaaataagttgtgcggacattctttcacctttatttcttttttaattcttatatcctaggataatgctttatttatgctaatgaaagctgattcaattaaatgcttttcctatcatttaaagataaattgcaataaatgcccaagtaatcattaaaataattcgcgtttacaaatttatttatcaatgctaaagtataagagttgtgttcaataagttaaaacacgaacaatattttggggagataaaatgaattttataaaaagctactttcaattagataagtacaaaaccaacattcgaactgaatttattgctggtttaactacctttatcagcatgtcctatattttgtttgttaaccctagcgtactgggcgccagcggtatgaataccggtgcagtcttcaccgctactgctttagctgccgctcttggtactgcaatcatggggatcgttgccaactacccgatcggtgaggcaccagctttgggaatcaatgccttctttgcttacaccgtatgtattgggatgcatgtttcatgggaaacagccttggcttcagttttcgttgcatcaattattttcatcttaattactttattcaaattaagagaaaagatcattgattcaattccagctgacttgaagttcgctatttcatcaggtatcggtttattcattgccttcttaggtttgcaaaacggcaagttaatcgttgcaaataaatcaactttggttggtttaggttcacttcacgatccacttgtttggattaccatttttggtttgcttgtaactgttatcttgatgatcttaaacgttcctggtgcaatctttatcggtatggttttggcagctatcttcggtatttgtaccggtcaaattgcattgccacacaaggttatctcaactgctccaagtttggctccaacttttggtcaagctatcttccacgttaaagacattaacactgttcaaatgtgggttgttgttttaaccttcctgcttgttactttcttcgatactgcaggtaccttaatcggacttgctcaacaagctggtttcatgaagaacaacaagatgccacgtgtaggtaaggccttagcagctgactcaagtgcgatggctgttggttcaatccttggtacttcacctgttggtgccttcgttgaatcaagtgctggtatcgccgttggtggccgtaccggtttaaccgcagtttttgtagcgatctttttcttaatctcaatgattttcagtccattgcttggtgttttcactagccaagttactgctcctgccttaatcattgttggagtattaatggcacaaaatactgctcatattcattggaacaagttggaaattgcagttcctgcattcttgattattttagggatgcctcttacttactcaatttcagacggtttatcatggggcatgatcacctaccctatctgtatgcttgctgctaagcgtggcaaggaagtcacaccgatgatgtgggtactgtttgtagtattcctgatcttcctgtgggtactgaacttttagatgaaaaagaatagataaagaaaaggactaagttcgaatttgaacttggtcctttttgtgtattcactaacattactttttattcttatcgattataatcgataaaaacgtcaaaatcaccaatcttatcgagtataatcgataagattgcaaaaaaagagtcttttatcgactatactcgataaaggctcttttttatattacccaggaaatattaacgtacagtttctaaacaatatgattttttataataaaatgcgtcataacaggcgaattttaattggctttaaaatttcttttttctaaaaacaagatagcctaaaagggtaaaaagaactatatagcacaatgtaccaattaataattgtggattagagagatgggaggttaagtgataagttgcataattataatactgtgtcgttaaattgagcatattcaaaggattccaacgaataatatcaaccggtccaatattataatttaataaattagatgatagactgcttcccataaagataataattgcatttatcataataactacggtgtttgaattaatcatacaagacattaagcaaataaggctgattattaacgtagaggttataatatcaacgcctgttgttgaaagcatatttataaataatgactgattatacttataagtcgcagtccaaggaactatttttgctataagtggaacagtgttaaagaagatagttacaatcatagctatggcatgtagaaaaagattataaataaaaattgtaatgaactttgcaagatatactgttcctttattttgagcatgatatagtaatgtcaaaatcgttttgttttggaactccattgagaaaatagttgaacctactatgaccaaaatcaacataattatttggctagagttataacaagtcacgcgtggtgctagttaaatcgttctagacaataagccaaattataagctaaaattgcaatttccaaccggctttgaaagcctatcagactacgtgctcgattgttctcggcattgtaataggtcagaagcgaaaagtcgctttcaattgttctgcgaatagccatcaattgatgatcattgtgctttttagctcctgtcatatttttacgatatggtgtccaaagttcgtaacccatttgttttagctgttgatgcagttctttgcctaaatagccttcgtcgccaagaagatagtaattagatggatgggtattttctatcagttcaactgtctccctggcatcatgaactgatgcctttgttacgacataatcaagaatgtaaccgtcatcgctaacaatggcatgaactttgaaaccatagaagtaaattttcttggtggccttataaccaatgttggcataaccgcgaaaaattttagcacgatagtttcgaattggttggcaaacaggtaccggaaagctgtcaatgatcaagaactgtccattcaggtcaacctttttattcatttcttgccgtatctgataaatcaattgcaatagctgacgtgaacgccgattaaaacgtgagtgtgataaacaattgaaacattcacagaatcttctttgtgattcaattcctgtcttagcttgccagataagtaaagccaaaatcagactgtccgtagttttaatttgatcaatatttcgccgatgagtaaactcagccggtgcatacaaacgataccagtgccgacaaattatcactaaatctttaaaactaacttgtaaatggtggctaaaacgcttaagcttaaggcagttcaatcagatcagactcttttctattattactatttacaagtcgagtctaacaagattggacttttttattaactaaaacgatttaactagcaccacgcgtataccctcatctaaccaagtagcatgtctacttggtttttatgctaaaaagatgtctgttaatagtatggatgatgacagcagattctattagatgatataataatcaaagaaaggctgtgactaaaatgaaatcatataaaaaaattcaagctaatgttgactcctcactagcacttcaagcagaaggaatttttcaagatatagggctcaataccactaccgcaataaatgtgttcttaaagaaagttgtggcaactggtggtatcccatttgaattaaaagaaactcctgaacaaaaagcctcaagagaattaattcaaagcatctcaaaaattccccacaaagaagctaaaaccaaaaaggaaattgaggattggctagatgaggactaatgatattgtagatatttatgttgcttacattgataagcctggaggaaaaaataggcctgtattaataattaaattactaaacagtaaagcttggctgctaaaaatcacttcaaaatataaagaaaaaagtgaaaatatccgaaagcattactttcccatttttgactggaaaaaatataatttagataaaccatcatacattgatactaaaaattatttaatagttactattagtgatttaaatatcgaaaaataccgaggccatttctcaatagcagatttacgcaaattaaaagattttattgacgaaaattcaaactaagaattaaactatatgttttagttcctaaacacaatctcaaatatgagattgtgtttttatttatccaaatggcatcttttgataatcatttgacgccttatgatgttcggattcttctaaattgccgctatactattttcaacaaatcgagttatgaaagatttatttaggaggaattcattatgacaactcaagaaggaaaaactgctttaattactggttcatacggtgggcttggtacccaattcgttaacattcatgcttcacacgggggtgacctaatcctagttggtcgcaatgctaagaaattagccgatcaacaaaaagaagcccgtagaaagtacaacgtaacggcgcatattatcgatgttgatctctcacaaccagatgctgcgcaaaagatctatgatacttgcaaaaagaacggttggactattgactacttaatcaacaatgctggctttggtggtcaaggcgaattcattaaaagaagtatggaacaagacatgtccatgatcgccgttaacattgaaacgcctactcgtttaactaaattatttttacctgacttcgtaaaacgcggccgttatgcctggcccacttcaagccgtttactacgctactaaagcatacgttacaagctggtcaaatgcgttatggcgtgaagtacaaggcacaggcgttacggtaagctgcttaatgcctagcgctatgcaaaccggttttatcagtcgtggtgatttgagttcaactcaattattcgcccatgcggttagtccataaggtgttgcaaaagctgggtatgaagaaatgattgaaggcaagcttaacattaccgctggtttaactgcagcccaaaaaccattcatgaaattggaaccaatgttacctaagaagatgctcatgaacaatgtttataagatgcaagaacaaggtagtagaaagtaatcaacttatcttataatatggatcaaaaggatggtatttgaatgaatcactttattttagatggtcgctatgaagacctactctcttttaacgttgaagaagcacttaaaaaagccaatattcctgaagattgtttcaaaaaactccatccttcaatgagtgaacaacaatactacaattttatggcggctattggtgatcagattagtgatccattcactccaattgaaattgcaactacaaatccaattgaatctttctctccaccaatttttgcggcatatagtagccgtaacggagatatttttatcaagcgtctagccaaatataaaaagctgattggcccattatcttttaaaattgatgaggatagcaagcagctctctattaccctaactccaagtaatcagcaatattccctaccctcttttctagttttatcagaatttgcatttttagtgggacttttgcgcaagacgaccaaagaagctatttccccgctgaagatcacaatgacatcccccgtcaatgatgagcaggtcattaacttctttggctgcaaaatcgaatcgggtaaacgcaacaccatcacttttgccaaaaaagacttgcaggtcaattttattagttataactaagcaatgtgggattatttcaagcctgaattaactaaacgcttatctgaattatccgttgatgattcaactagtgctagagtacgtagcatattgaccgaattacttcctaatggtgaatttacaattgacgatgtagctaaaaagttaggttattctaaacagactttacagagaaagttgagtagcgaaaacactacttttcaaaaacaactgaactccacccgagaagttttagcgctaaattatttacaaaacaccgatatgacaactagcgatattgcttaccttctaggctatcaggaatttaattcgttcttacgtgccttcagcatctggaaaggcataagcattagcgaatatcgtgaaaaaatgaataaataataaaaagcagatatattttctgtttttttactttataaaggaaataatatgagatttttgctataatttactttataaaggaaataatatgaaaattgctaaaaatttactttatgaaggaaataatatgcagttaaatttaattaaccgcccacagtatttaaatcaattacttcaatttcaaaatacagaattcatcaaagtactgacgggagtacgaagatcaggcaaatcttatattttaatgctttatcgtgaatatttactcaaacacaacataaatgaacatcaaatcatttatatttcttttgaagactttgataatatagatctttatgaacctaaaaagctttattcatacttaaaagaacgaattattagtgaccaaagaatgtacattctacttgatgaaatccaatatgtatcagattggcaaaaagtagtaaatagccttcgacttaatcctctacttgatatcacaattactggcagtaattccaatctattaagtggagaattagcaaccttactatcaggaagatatgtagaaatacatgtttatcctctttcttttaaagaaatgctagattttaaacatatttctgaaccatcagagcgtcagattgataacttatatgatgaatacattaaatatggtggtttccccgcggtagtgttagcaaaagaagaattaaaacaaactattctttctggaatttacaataccattattgtcaatgatatcggctacaaaaatggattaagagaaccagaattagttgcattagtagctaaatatctagcagattcgattggtcaattaattaatccgaacaagattgtaaatacactaaaatcagcaaattttgatatctcttataacgctgtgcagcgttaccttaaatattttgaagaagcatatcttttttataaatctagtcgttatgatattagagggagaaagattctttctactcaaggtaagtattacattgtagatactggtttgcgtacccaagctttaggagaaagaaataatgaccgcggtagtgttttagaaaatatagtttatgtcgaattacttcgccggggctacacagttcaaattggtaaattagataataaagaaattgatttcatcgttttcaaggtaaatgataaacaatatattcaagtaacctaccagcttccagaaaattctactagagaaactgataatttacttcaaattccaaataactacaaaaaaatagtcatcactggccgatatgaaaatgaagaaatgatttccggtattccaataatcaatattaaagattggttattaagctctaaaaactgatcaaaataggatcgactaactcatgtcgatcctatttttaaattaaattatgttttttacaataagtaaaaattccgtcatcttgcacgctgccacagatgtcatcagcaatttccttcacatcgtctgttgcgttccccattgcaacgccgtgaccaacagtctttaacatttcaatatcgttgccgccatcaccaaaggctattgcttcgctcacagggatttgataataatctaacactttttcaattgctacacccttactaccagtagctggaataatatctgctgctctatcccaccaagctgttaccttagcattttgcgtattagctacaagtccgtcataatctttttcacgacagcctaccattatttgataaaccgtatcctgatcgacaaccacatcaaaatctggcgccactctcaaatccgttccaccaatagcaaagtattcctttaaatcctcatcaacaccattagctgcaatccgtgttttggtagctacagctaacggccgatttattttctgagcattttgaatcatatgcaagacatctccttgccttaacggattatcaaaaacaatgtcttgatcgttatagcagtaagaaccattaaaagttaaatatgcatcaaaatctacacccaacttaggcagttgcactggtggtctgcctgatgcaatacaaatcataatgccgttgtcttgtaaagcatgcagtgtctctagcattttaggtgtaattgattttttcttttcaattaaagtaccatctatatcaaaaaatattatcttaggtttgctcattatttttaccttctaaagaattttctactaattattatactttaaccgatatttcccaggaaatattaaaattgagctctcttcctcaacatctgtgctaaactagatacaattagtttctttaaaagttaatagttacggaggaatttttaaatgcagacattggaaaaagtctttcatttacaagatgctcataccactgttaaacgtgagttaatcgctgctttaaccacttttgtcagtctctcctacatcttattcgttaacccaaacattttgcacgcagctggtatccctaaaggtgccgcttttactgtaacagctcttgccacagcagttgggtgttttttaatgggttttattgctaattatccgattgccttagctccaaccttaggtagcggtgcctttttcgcttataacgtatgtgttgggatgcatatttcttgggaaacagctttggctgcagtccttgttgcttcagttttattcattttaattactgtctttaaattacgcgaattagtggttaatgccattccacaagatatgaagtatgctatttcagcaggaattgggttattcatcgcttttattggcttaaaaaatggtcaattaattgttaacagcgattcaactttagttactctgggaaaatttagtactccagcagtttggatcacattatttggcttaattttgactgttgtattaatggcattaaacgtgcctggttctatctttattggaatgattgttactgccatcttcggtatgatcattggtcaaattccattaccacataacatcgtttctggtgccccaagtattgcaccaaccttcggccaagcggtttttcacattaaagatattaatacagctcaactttggatggttgtactaactttcttattagttaccttctttgatactgctggtactttaattggaatgactgaacaagccggtatggttgacaaggatggcaagattccacggatcggtcgtgcttttttggctgattcaactgctatggttgaaggtgcagtctttggtactgctccacttggaacttctgttgaatcaagtgccggaattgccatgggtggtcgtactggtttgactgctatctttgttggtattttcttcattatcagtatgattttcagcccattgttacaagtaattccaactactgtaacggctcctgctttaattatcgttggtgtactgatggccagcaacttaaagaaaatcgattgggaaaagttcgaaattgcctttcctgcttttcttaccgttgtagggatgccactgacttactcaatttcagatggtttggcattaggcttgattgcctacccaattaccatgattgcttctaagcgttataaggaagttagtcctatgatgtatatcctgttcgtagtatttatcatctttttcttagttacgaatttataaaaagaatgctaaagataagcagtttgaagctgcttattttttattgacttgatttttattttgtactactgtaataaatatataagacagtttttatgggagaagaaaaatgagactgtaaaatagtttgtgtaaggatgaatgattccttaaatttatttctttaaacattagaaaaaggagttcctttctcgtatgattggtttgaacaaaaaacacatacagaaagaagaactccttcatgaatgattttaccaaaaatatggctcaagcactattcgatcaagacaaagttaatgattttttgcgcaaggaaattcaaactgcagttaatcaattgcttaaagttgaattgactgcctttctgggctatgatccctatgccagaaatggctggaatactggcaactctagaaatggtgcttatttccgcaaagttgatacgcaatttggcccaattgaagtgcaagtgcctcgggatcgcaacggtcaatttcatcagcacacgctgcctgactacaagcagcactcggatatcttggaaagcatgattatcaagctttactccaagggcgtgaccaccagggaaatagccgatctaattgaaaagatgtatggcagccattatagtccagctcaggtatcaaatatttccaagcagatgctccccaaggttgaggcttatcacaagcgcaagctaagcgacaagtttttctgtgtctatttggatgcgacataccttcctttgcgccgagaaacgtttgagcgtgaagcagtatatattgccattggcattaaacctaatggacataaggaagtcattgactactgcattgctcctagtgagaacattgaagtctggacagatatgcttcaaaacatgaaggccagaggcttgaagcaagttgaactctttctttctgatggtgttgttggcatgaaaacagccttggccaggacttatcctaaagctcattttcaacgctgtttggttcatgtcatgcgcaatatctgcgctaaagtacgcgtcgacgatcgtgaaaagatcatgaacgaattcaaacaggtgcatcaacagacaaacaaagaagaagccacagctgtcctgcatgacttctataccaaatggggcaaggtttacagccatgttatcagaagcttgaaagacatagaaccagatctgctggtcttttataactatcccaagcagatcagagcttcaatttattcgactaacatgattgaatcatttaacaatgtgatcaagcgcaaagctaagcctaaagcagagttcccaaatgaacagtcgcttgatacttttattggcattcaagcaatgagctacaacgaacgctatttcaatcgaatccacaaaggctttggtcaggttcaggataccttagaatcctactttgattaaataaaagattaaaaaatcaatttacgagaaagaactatttacacaaaagatttgacagtttcagaaaaatgaaaatcaaaaaagtactactgaccacgtctttactcacgattagtttgattactctatcgggatgtagtttccacctgtttaccaacaagaattccggtcctacaatcaaacgaactttgtcctctaagaaattcaattcacttaaggtagccagtgacattactgatgttgaattacatgcaagtaatcaatacaaagttatctatcatgggctcaagcgtttcaaacctagcgttaatgtgaaaaatggtcagttaaagatcactcaaactagtaatggtgtttcttataacatcaaagaaggcaatacagtggcaatctacctacctgccaaagaattacaaaatatcaatattaatctttctgatggcgatatcgatgctgatggcaaggttcaagcaaaaaatgtcaaacttcacagtgacgatggtgatgtcaactttgacgatttaagaattagctctggcaaaattacctcagatgacggcgatatttcagtttctaatctacttactagaaaaggcgccacagttgaatcagatgatggtgacattcgtattagaaagagcaatgccagtggttaccgcctaacttctgacgacggtgacgtcacattcaagggagatacttctgataatgatgacggtggttcttactacaaaaatactaagagttctaacctgctctctgctcacagtgatgacggcgacgtcaacgttaactaaatttcgtcataaggcgataagtttcacatgaaacaaaaaatcaatgcatcattgataatgcattgattttttacttttttcctcattcatagcataaacacgactttacaagattatttaagtttctattgaaatagacataattttaatacgaaaaagataagactaaattctacttttccattaaaaaatatttaccaattttccattttctaagtcaaaatgatgcgtaaatttcttcatcgtcgttgatgaaatatggtggtcaatttcaattactgttaatggtgaattcaaaaagacattatgaatttgctcagcagtttgcggatcaagtgaagcagttccttcatcaactactaaaatttctctttggaagagaaaagcacgcgctaattcaattctctttctttccccacctgaaagattatgcccattttcttcaattacggtatctaagccatgtttttgaaggtaattagttaatcctgcttgttgagccgcagccacgatttgcttttgatcaaattgtttaccaagagttaaattaaagcgtaaagtcacattaaaaatttgcgaagattgttgaacttcactaaaaatttgcgtttcaacagcctgatcattaaccaaaactcttcccttctgcggagataatttacccattaacaccttaagtaaagtagatttaccttcaccagactttccggttaacagaattttatctcctttattaacacataaactcacattattaagcactggactatcagcttgatagccgaaagttacattgtacatatttaattgcttaaatttgactggagcttcatcttgcttagtcgttaaaggcttgaaagataacaacttagcggtcattggtttagtagcagcaatctgattacgaatactattaatactaaagaaactatttacaatccaagcgctagagtattgaacggcaacaaaagaagccaaagcaatgtgtccttgaattaccataataatgccgattccaattggtaagaagtctagtgagtaagctaataaatcaacgtaaaaatcacttttagcaattgtatcgtcacgttcacgtttattctcaacagaatttttaattactttactacccttctttacaaatagagataatacattgtaatttaaaaccgtattgatatttttgagtaaatccgacataaacgttacataactacctgttgatttactccaattggatgactgattggctgttttcttgctaaacaaactaggaataaggcttgaaagactggcaaaagcaacaaagactaatgtcaggactacactatttatcagcgcaatagtaacgataccaacaattttaaccacagtagatactagtgaaaataactgtctaaagtacttttcttcaatcaggttaagatcattattaatgaaagaaattcgattagaaatttctttttctcctgtttttacaaaatccgtctgcatcagatactcacgaacttcttgattaaatagtgctacattacgattaattactcgattatttaagtattctacaattacaagtaagatttgcaatactgtaattacgataatcattctcaccgtatttggaatacttttacctgtaattaacgcaaaaatttcggagtatgaccatgtgctaaaagacaaagataatccgcttaaacatgacagaataatactgagcgaaaaccatttgaggtcaataaactttttcataaatgaatctccctttcaattaagttggattcattatctgctttagttcacgataaaaatagctttctgcaaaagtgatcttcaatctgcatatatgcagattattctggaagaatagacagaatattttctaaattacttgccttgatcaatttcttaatagctaatacctgctctgtatctccagcaaaatagcattgataaaaatgaccaatgattttatataagactaaagatggcgtttgacttaattgcccaagtaaataaataggctctttattatcttttacaaatttattttcagcacaagtatataaataattcacacaaatagtggcaattgttgtttgcattttttctgtctgctcagacattttatcattataagtagtgaaaattttttgaaagaaaaaagcaaaatcgtcatgagtaaagatagaggtaccaaaattggctaacaaatctaaactaaatttatcttgaagccaattgtcgcctgcaaacaagcgttgcagtactatatttttatctttgacatcaaatttacgttttccttctagcaaggtaagaatcaacttagctttgattttcagaagatcatgatgaggcagttgttgaatttctgttaccaattttctaacttggttaaagtcttgattataataagcagtctgtaattgatcacctaaattgttttcatcgtcagcttgtgcgactgaattttgcttaaagaattcatcaaatgaaattttatttttctgcaaaattgccattaagtccttagctgatatttcatgcaatccgcgctcaatcttagaataatgggcaggtgataaaattcctgctacaaattgttcttgcgtcagtccccgcgattggcgcgctttttttaatgctgtgttaatttccatagctgtttttatttcaatttacggtcccttttagatacaaaccaaattgtcccatcagaagttgcccagtgtccatcagaagttttatgaaatttcagcgtcagtttcttactgtgtagtgtccagctatttttaccttccattgtgacacggacccggcctaatttttctgaatttattttgttattgtagtctttgggatcatatgaattatgcccatatactttataaattgcttttgctgccgcagtatttggcttaatgtatttataagtaccagatgcatcagtcttaaaaactgggctggatgcatcgatttgaccactatttttccccagagctatgttcaccaacatgccgagatgattttccattacagaatctgtttgatggggatcataggttgtaagatttttattagcaaactgttctggaatagtttgctaattgcgataaaacaaccagccaccgactgccagaactacgactactacaacagttatgattgtagctttctttttcataaaggatcacctgttatctatcagcttttttctgaaaagtaattaatccgtgtgaaactaatctaacagttccgccataataaactacccaacgtactttgccattactgtactcttcatacattctctcccgctgaagatatccattatatgtaccatcattataaggaatttccatcggagtatctacagcaccatcataagcgccataacgcgtcttatgccatgggcctgttctcttaactccatgaacttttttagttaacggtagtttttgaacgttttaaactgaatctgtactagattccgcagcagatacaacagcagtattagtggttgcaaacagagcagttgctgagaataacactaaagttgcttttcttaatttcatatctaacaccttatacctttcttttattgtttattttcattacctagttgttcattatcattgacaacaaaatttgtcatcattttctttttacttgctaatgtaggaattgggtagcttttaagtttagtattatacaaatagccaccgtacataattcctgttggattatgccccattggaacagtgtacatcttttccagatatcctctaaatacctcattgcctcttcttacagtgtaataaacataagtaccctgatcatgatagtattgacgttgataccagatatgttcaacaaatccttttgattcagtgctttgtgttgcagcttgtacatggtttgattgaaccaaagctgaagttgaaactgatactagtgataaagctaatgctgctttagctgttaaagttaaaattttcttatttcttttcataactttaacctactctttttttcttttcttgctttaattactacctaatccagacggaataggaacccatggacccatatttttctctcctttcttatttatttttcattaattttactttcactactaagaactgttcagaaattgtcaaagatgacaattttctacaataaaattcttaatcaaatgagacattccattacttttcataaattcaataatctgatctacttcttcatttttgccatcaaaacaataatggtaataattggcaactattttagcaaaagcattacgtggaatttctggcaatttagaaatgaaatcgtaaattagatttaaatcaattttccttctttgtacgtatacattagccaaataattaatagctattgctgacattatttcttgtagttgaccagacagattagatacattatggcgatacgttctaaatattgaattaatcaaaaagtccatatcttctggggcatatatcatcatagtcattgcaaaaatttgtagagtagattcactccactcatcagaatcaaagacaatttgtctaacttgtcgtttaatattctcagatatttgatcaatttgtttctttaaagatgctattgaaaataccactaaagcataaagattaaatatattctgactttgatttttatattttccaatttcaattttcaaatcttcaagtcgttcgatctgctgatgataatatgcatcttctaattgcttttgccagatcaaatttttgtgagcaagatcattttcactatcttcattttctattcgctctaaaaatatagaagcttgcaatccatgttgctttaacaaatcaattaaatcctgagtctgaatatcatttaatccacgttcaatttttgaatagtaagatgttgataacacatcccccgccatttcagtttgtgataatttcatactttttcttgtttgttttaatgcttcaccaattgtcatatctttccctccctcgtattatcatatttttcattattgtataatgttttgttaattttgcaatagtttgtaaaacaaaagcattatttttatttttcaatcttttatgtttacaaatgtaaacttagcgagtagaataaaaaatgtgaagagatgaaaataaattatttaatttggaggttacggtcatggatgtaactaaaatcattatccttgttgtcgcaatcgccttgatcggctttatcctttggtggttcttcggcaaacatgacgaagctatcggtaaagcaagtgttaatcaaggcacacaagaagctaacatcgtcgttaacggcggttactctccttctaccattgttttaaaacaaggcgtaccagctaaggtgaattttgatatgcaagactctaccgcctgtttatctcatgtcgtctttgaacaacttggcgttgacaaagatttaactaagcaaaaagttactacagttgatattccgactgataagaaaggtacatataattttgcctgcgggatggatatgttccacggtaaagtcattgttaaataaggagtttacaaaatgagtattttttcaaagaatcaaactaaaaaagttgttgttaatgcagaaaatcatggttataaaccaaacacagttactttcaagcaaggtaaaccagctcaattaaagtttattccatcagataatatgggctgcatgaatgaagtagtctctaaagatttaaattttgaccaaaaattagatggtaaaaaagaagttacgattgacattccaactgacaagccaggtacttacacctacgcttgtggaatggatatgttccgcggaaaggttgttgttaaataatgaaactttcaaacattaagcgcttctggatctcatttattctagctattccaatgctaatccagatgttcgccatgccctttcactggatgatgccaggctataattggatcgcttttatcacgactacaatcattatggcgatttccgctgccccttactggagcagtgcttgggccgcttttaaacaccataacgctaatatgaacacattagtagccgtcggtacttctgtagcttacttttacagtatctttgctatgtttactggacgtgaagtctactttgaaagtgctgctttcgtcaccgtcttcgttttgctcggggatgcaatggaagaaaagatgcacaataatgcctcgaatgctttagctaaactaattgatctgcaagctaaagatgctgaagttgaacgtgatggcaaattcattaagttgccactagatcaagttaaagttggtgacatcattcgcgttaagcctggtgaaaaagtccctgtagatggcgtgattgttgacggttcatcgactcttgatgaatcaatggttacgggtgaaagtatgccagttactaagaaaaaaggcgacgatgttgttggctcaaccatcaatactaatgggacttttaccttcaaagcaactaaggtcggtagtgacacgatgctttcgcagattgttgatttagttaaaaaagctcaaaccagccatgcgccgattcaaaacctaactgataaaatatctaatatctttgtcccagtcgttttaattattgcaattattaccttcgtaatttggtatgttttcttaggcgcaacattggttaatgctatgctcttcgccgtttcagtagtcgtaattgcttgtccatgtgcactaggtttagcgacaccaactgctttaatggttggtactgcccgtagcgctaaaatgggcgttttaatcaagaacggtgaagttcttgaagaagttagcgacattgataccgttgtgtttgataagactggtacaattaccgttggtaagccacaagttactaatgttgtaggtgataaaaacaaggtcttaactattgcagctagtttggaagaaaattctgagcacccactagcaaccgctgtagttaaagctgctaaagaagcaaagactgaaattaagtctatacaaaactttgcagctattgaaggccgcggagttaaggcaaactatggcaatcaagaagcttttgttggtagcgatcgtttattagaagatatttctatttcccaggaaatgaaagatcaggctctccaacttcaaaaagaagcaaaaactgtagtctatgttggcctaggtaatgacatcattggcttaattgccattcaagatgtacctaaagcaagttctaagcaagcaattgcggaacttaaaaagcgtggtttaaagacggtgatgcttaccggtgacaatcaaaatgttgctgaagctattggccgtgaagtcggaatcgaccaagtaatcgccggtgttttaccaactgaaaaagccgctgagattaagaaattgcaggatgaaggcaataaagtagcctttgttggtgatggtattaacgacgcacctgcactgtctacagctgatgtcggcatcgccatgggatcaggtaccgatattgctattgaatctggtggcattgttctcgttcaaaatgacttaatgggcgtagttagagcgcttgagatctctaagaagactttcaacagaatcaaattaaacctcttctgggctcttatttacaacactattggtattccaattgcagcaggtttattcatggcctttggtctgcagcttagtcctgaacttgcaggtttagctatggccttctcttctgtttctgttgtaactagttcacttttattgaataaaacaaaaattgctggtgaaacagctcaagtttcaaagtaaaataattctccgaccggatattttaatccggttttctttttgtaaatttttcaatttgcgacttaaagtttcagcagtaatacccaaatatgatgctaagtctttcttttttaactttaattccacatttttactcccctgtttttgagctaagtcttgcaaataggccattaagcgttcctgagcatccattgaattgcgccgaatagagttagtttcgattgtaaccagctgctcgccaaaattattaagcaaattcaatgctaaatctggcgtctttttcaataacttttgaaaatcacgacgctcaatagaacaaacataagtatcttgtaaagcctgcacaaagttttcctgggcatgttcttgaaaaagattctgctgtccattagcatcgccttgattcagcacacctaatacggtctctttaccgtcttcgttgagattgtaaatcttggcactgccttgatccataaaaagcattccgttcttaccatcacctggttgtcgaataatactgccttttggaaaatattcttggtgcgttgaaattggtactagtttttctaacatttcatttggcaaatttttaaatatggctgctttgcgaatacaagccatgggtgaatgttgcataaaagcctcatttcttgatctaagtcaatttatttttatctgcatcttaatacaatgtatttaacaactcaagcagaaaggaaatattaatcatgactaaatacatcgcacatattgagcctttaaacgctaaaaaaattggtaccaaggcacacggtactgccacttttgaaaaaaaaggtgatcaactacatattcacgttgagatgtttgatactccagcaaatattgaacactgggaacatttccatggcttcccgaatggtcaaaaagctcatgtaccaactgcagctcaagacgttaaccatgatggctttattgatttaccagaaactgagccggtctcaggaactacaatggtgccacttgatgatgccccagaaaacatgaatattcctcatgatggttatcctgttgccgacagtaatggacattatgaatatgagattgatgtctcattaacaaagctacaaaagaaattcaaagctgcctttggtagcgataaactacaactagacaagcgtgtagtttacgttcatggtgtacctgcagatctggaattacctgatactgtaggtggttgcgtaatgagttatgatgcccatactaccttgccaatcgcagctggtgaaattgaaaaagcttaagttaaaagccattccttgtgaatggctttttgcatcctttcttattttttgatagcatagatatagattatgtaaaatatctaagaaaaggagatgttttataagtaggcttagatcctactcttatggagaataacgaaaaaattatccaagaaaagaaacgcgaaaaatttattaaaactaaaaagaattacaagcgtgcaccactaatgtcagttcacttaagagtgatgatggccgttatcttaggtcaaatcgcctgtggctattccctgggaattagtggtaccgctctttctaatgcagctaaatatatcaacattagtgacttctggactggattaattggggctggtgctttaattggccttgctggtagtcttttggtcggtcgactttcggataaaatcggtcgccgtaaactcttaatgtggaatatgtatatattagctgcttttttctacccaaagtcaagtattatcaatgatttaagaaaataaatttacttgttttaatgatgcgaataaggttaaagcaaataagagtttaaatttaagaaaaagcgaaagtaccacaaataagcctatgaatacttgtagtttttccataggttgcttatacttaagttgattatttgatttcagctaaagtcttttattttcggtggctatgttgtaatcatataattgatcatgtttgataagagcaaacattgtgcgtatcagtttatggactgatgcaatggcgattttcttatagccttgtctatttgaagatcgttttttcttgtcataataatcagttatatggcaaggctgcgtagcctttaccgtctccatttgagtaataactcgataaagtatttttctggcaatatgattgccatgcttggtaatgccaagagaactgtctttttcaccagattggtaccttcctggatcaatgccaacaaacgcatcaatttgagctgaagtgctaaaccgtcttagatcaccaagctctgctactaatctcactgctgtaattctagcaacccctgggatactcaaatagatggataaagcacgagcgtttactgctttagccagcttttccatgtagttaattacatagtcgcgttcttgctggagtgaaaataaattagaaatgttcctttgaatagctctaacgataatactatctttggaatcataaggataagcttctctagcaaaagcgtataatcttgtggttaagtaccgtgccctttgttgtcctattccagaaatagaattaagcatttgagttacctgtgtctcattcttttctagaacatatccagcatgtgggaaaagactaacaagcgcccaataaattctgccagatggatgagacagtatttcttcaatttgtgggaaagtggattggaggttgcggtgcaattgatttttagtagtaactatactcctagtaagttcttcataatagcgactggcattctgaagttcatgatactctctgggctgtggatcacgcagcttttgcggggcattaaattgaattaaagccaggcgataagcatctaccttatcagttttattatggcgtaaattattgtccattagctttttcgctttaagcggattaagcttcaaatacttaatatgataatcctctaagaaagcttgcaggcttagagaataaacaccagtagcttcgaaaacaactaaaggagttatcaaatattggttcagttgctcataaagtttttgatagccaaaggaatcattagagattctaaaagattcgccttgtttgatccggtcattaaccacacaaactgtggaagatttactgctaacatcaataccgaaaataatttgtgattccataatataacctccgctgtgaagataaacctctttatcaacctattaattctaattttctaaacacggcatctaagtgcccacagacttcgaagagacttaagaataggtggtaaagcagtccgtttcttttacgacatcaagtgtctaaaaagctgaagacttgatttgctttatcttcactttctattttagacaaaataaaaagtgccagatcgtgaatccgtcgattcatgatccaacactaggttagtatgtttctttattacatctaataaccgctaattttagcttaacctttatcctccgtattggaattggtttaatgattgctgttgactatactgtagggaatgccttgttaaccgaatggctacctaagggcgaagacagcaaacgccagagtcatttattaatctattggacaattggttttattttgtcctatctagctggtagttttatcactggatttgatagttatacttggcaaataatcttagcaacaagtgcagtacctgcactagtaactgctatcttcagaagtcttttcccactccctgcttcaccaggctggctagcaagtaagggtaagattaagacggccaacaaggtcattcgtaagcacatgggacgcaaatggagattacctgcccgctttatgaagcggaataaaaagaaaacgcctagaaatatttcctgggcaattttattttccaagcaatatctgcgacgtactctagtaggtgggattttctatgcctgccaagccttctcatttttcggtattagtatcttcttgccaattttattacaaagcatgaatatcactagtggaaatatctcaggaattatctacaatggtgggatgttcattggtgtgctaatcggtacctggatctttaacaaggttagccgccgcttctatcttatcagtaattttctaatctcaggtctgctaatcggcattttagcaatagtacctaacttaaattcaatacttaaattaggtatttttacgttatttgcgattattttatcagctggtttgatcctagattatccttatccgactgaattatttgatctgaaggtacgagcaactggtgtaggtacttgtattacaatcagccgaatcggggctgccgcagggactttcttattgcccgtcttaactaatgtgggtggtgctagcctggcaatgctagtttgtgcgattgttttactctttgcctttatcgtttgcctcatctgggcaccagagacctcaccccaatttatgaaaaaataaaataattaatatgctacacaaaaagacagattacatatgatgcaatctgtcttttcttatttcttatcttttttcttcttgtccttagaatccttatttaataattcttctggatccttatgcttaggcgtcttctttggatctggtacagttgcaaagcgatcaagcatcttctgtaagttattagggttgtcaaaagttaatcccataaaacatcttcctttcgttttctcaattatattaaaatttcaattcaaatgacaataattttaacccttattatcaataaattgttgcatcttaatcatttctgaaccagccagatcaacactaattaaatcactataatcatgaacactagtatctcctaaaccatattcagttacaatttttaggtcgaagccactatcagagcgatcttcaattaagcctaaacgatcaggataatgataaattgaatcactaattttcactatttgatcttcgggccaattatcaataatttctgctggtgactgaatttcatcccgtaatttaactgaacgctccagcctgtccggatcaaaactaccattatttttttgccattgaactaaaaaattaaagaagagcaagcgctcggaatcttcagtaatatgcgttatatggctcctagcaatcactgcaattgattcaacctgccctaactcattgatgctctcgaataccagattatcatcgtcatacttgagtactttaccaatagcaaaactaccatattgatcatcaaaggtataatcaaaataaatttcaaccagatccaagtcgttagtgaattcttgcttctgtgattgccgcaaatattgggtaaataagcgattatcaatggcattagtatcgacacaaacaatatcgtcaagtggtataacggtggcataatgctctaaagttaattcattgcgttctaaaatacgcacctcttgctgatcaagttgagtaattaagccagtgtaagtagcacctgtattcacctcaaaagttgtaaagggttgcgtgtcagctacgttaatcagtaaatcatgcagattagtaaaatcccaggctaacactgtcttatttaattgctctaagttaaatgaatccttaacttgggtaatcatataatagcgtagattaggcgtatcgtcttcaatcttagctacttgatcttctttaataaagactattccacctaaattaccgccttgatcgactgattcaaaggtaatccagccatgatgttgcgtgataatgcggccaatatagtaagaatttgcatcaactaccgtaatacttgcatccccatctaagttatatttttcttgatcagccttaagcgtgatttgtacaagtttattcaatttttcgccccctcttttttcttccgtgaatttaattgtcgcctaatcattatttttctgcaagaaaaaagaagatggtttagccatcttctaatattgagttaattctgtagaattttggggctaacgaatattacttcttttgtgcagctgcctcagcttctgctgctgtgtttgaaggggttaacgaagtactgtttggatcaaaacgcacatcgcttgcttttacataaccatcagcaaattggacttcaccttgattactatagacagatttaccaactaagtgataaaacagttctgccttattttcacttggtacccagatgtaaagcaacttatttaccttgtatcttccaccttgttttctaacttgatcgcccttgaagtcaatcttgtttccgttagcatcatagatatcagttggcttaataaattgaattagtgattttttagtatgataataattttgaactggaatatctttagcagctttaacattgaaattataaatccaataatcagttcccttaatatgatagattgctaattcgttgtcatcgtcaccatctctaccagtatcagcacgtgtcccttgctctaaacgatccactgtaaacttatcaccttgttttgcgtattttcctgaaggctgaactgcatctttatcaggtacttcaacaaaaagagcagcacgtttatcagttacagtaacagtcgtttcttctgatttagttgtttgagacgaagaagaactagtgttgttatttgtattaacactaattacaggacctaaattataagacttaatgtactgtttattaggtccacctattctaaagtaatgctttccgttcttaaatttgtatgaaccgccataagtcgtgatagtttcacccttatacaatttccaacggttattgtaagaggttctgccagttgaggtacgataaatgtaagtattatgagtaatcttacgtgttacaccatcaatgttggtagcctttatgtattgatccttgccgcttactttatagtaaagcgagccgtcaatttttacagggttgctttcaacagtgacatattgataggcattgtattttacacctgtgctgttaccatccttgtcgtaagctaaagcagtatgcataactgctttagtcgtagcagcttgtacttcattagttgtattagtcaaaacagccaagggtgcaactgtcattaatgtagctgcagaaattaatgcaatcttatttttcttcatcataatcatccttttcaaatctctacactgctattatattctctaaagctaattaaagcattaaaaagaagcccattaagtgaagtggacttctacttttgatattttcttttaatttattttttcaatgccgttgcctcagcttctgctgctgtgtttgaaggggttaatgtcaaacctatattaacaaatttaacatcactagctttaacataggcatcattaccgacttcaatttgatcaacgttacctgtagcatagaacttagtaccaactaaatggtagaataattctgccttgttttcacttggtacccaaatgtatatgagtttatctactttcagatttccaccttgttttacaatttttgcgccattgtggttttgcatagtaccgtcagcattatacacatcagtatccttgacaaatttgatatagccataatgttcgtgatcataatcatgctttactaattttttatcggcagttacatcaatagctaaaagccaattgtctgtaccttttattctatacattccagcttgtgctgcagttgatggaaaatgatcagcaaacggagtaacttctagtttatctacaataaacttcgtaccagctttgagattctttttgattgctttaccttgattatcataaatatttacaccgtaagcattttttacggtaacagttgcttcctcggcattagtattagtagcgttgtttgattcattgctggttaaatttgatgcagtattagtactaataactgggcctaaattatatgatctaatatattgcttacgtggcccacctactctaaagtaacgtttaccgtttttaaatttatatgatccaccatatgtagttacggtttcacctttataaaatttccatttcttactgttggcagtcataccataaggtgtcctttgagtagaagtccggtatatataagcattatgagtaatctttcgggttacaccatcaatattagttactttgatatattcatctttatctgtaactttgtaatattgacttccattgatagttactagttttggatctacatgaacactaccataaacgtaatatttatgaccggtactatttccatctttatcataagctaatgcgttgtgcataatagtcttggttattgaagaatctgcttgtactgtatgagcgctagttgtagtactcaggataggtgccgttcccattaaagctactacagaaattaacatgattttattttttctcattattaaccaccctttgaaaatctctatacttcaattatcttactttgtataaacttagacaacaaaaatagcatcaaatcatattgatttgatgctattaaggctaaaatttacaaatttagtcccaagctaattcataaaccttatttgaaacagttttatttttaccgttaacattagcatggtatgcaacagttaagtaaccgtgattttcatcaataatttggatactttcaacttcactatgttcatctgaaatatctaatccaccaaatgcacttaagtttacattttcccattgagattgatcattacgtgcataaaacggaatttttacaatttccttgtgatagtatgaccatgaaccattacttaaacttggtgatttttgactagtaatataaatattaccagaattatcaagatcataaccttgtacagagtttaaaacagatccatacaaaccatatactgtaaaactagtttcacattgataatttcccatatttacgaaaccattatttccagcctcatctaatgcattattaatgacatttaggtcataaattgaaaagtggcctgttccattattctcaatagtagcaattaaaagcatactataatctggtgaaactgctacttcagcgcgttccatttcatcaccagagcattgatcttcaggattacctgcgcggttcaagtatgctaaacgtgggaattcagtatttgatgaagcatatgatttgtatctaatatctgctcgagcaatttgagaagcccatttattcttgtttttagtaccaacgaaccatttaccagatctacctgaatattcccaagtttgggtgtgtccagctgctgcacctactaaagtaagcacaggggttgtcacgttgccacggaagccacgcaatacatgtgtttctgtctggttatttcttaactgtaaaccataaacatactttgatcctacattacctttttgaactacagctctgtaacctgtattcatatcgaatctatctaaaattctaatatttgttgcatctaacataataaaacctccgaaaaatttaaaaactactacttatcctgagtttgctcattcatctgtttagccacttccgcaaagatgtcctgcacttcttgcctgttcagcttgaagccttttgcttcaaggctgttcactactgcgttgccaacacggttaatcttctgttcgtcagaaagattttctttgtcgtataagcgtacatagcttttcattaagctatctgcagtattgcggaattgctctaagcgtttattcttgaaatgaactctgctcaagatgccaatacctactacgctaattacccataacgccagagtaatcagctcaacgtaatcatgaatatccataattgaatgaatcacctctcttttgatcaaacgatccaagggggctaacgaatgtccattggacttcacctctgtttgataatgttcaacaagacactaatacacttgatttatattagtttttagactaatataaatgtataagaaataaccgaaagctggtaaatgttccgccaagaattttattaacttaggttgttttctttttcatatctcgttgacaatatttactataagttaattaactaattatgtcaataaaaaaagctaaaaaactattattttttcgaacaagtattcttgaaaggcttggtatgattgagttagagcgcacaaaagaattagcaaaaaaatacaaaatgaatctccgtgaagtaaatgacaaggcaggtttaggtagaaattccatctataattggaagaatcaaagaccaggaattgatgcacttaatgcagtcgcagatgtactacatacgtcagccgattatttaagtggtaagacaaacaatcctagcccgtcacctaaaggtgatgaaactggtggtatttctattgatggtgaagtaccatatttctatcatggctacactattccagaagactacctgaacatagttcgtcaacttatggaacgtgatatcaaaaaaggacttattaaacgacatgacaacagcagatcagaataaacaagaactcatagactggttattagcctatgctaaaaaacgtgatattatggttgaattagttgaagtaaatccaacttacccatccatttctttaaagaactatagattcgctgtcattaatactaattggcatcatcaagaagaagtaccattttcaataggtcatgagattggtcacattatgctgactaatggtgaagtagattctcgtcaatatatcacttttacagaacagaattccgaagaaagtccagcagacatcttttcaataaagctaatctataattactcctgcaaaatgggtgattgcttcgaagatacaggtttatttatgcaagcatacgggataccaaatcgagtagctgatgcaactaaagagatatttaagcgagcagcttaaccatcaacttctatattgatttgattactaaaagttttagcattagtttttacactacttaaaatccaattaaacaaaaaatcgctactcaattgagtaacgattttttctatccatccagttcaacgccttgcaagtccttcatcttgctataaaccgcgccacgttgacttgaatcaaactccagaataagcatatctccgccgcgaattacggtttgaccatttggtatgatctcatctccatcgcggtgaattgttcttaccctagtatcaaccggccattgaacctcagaaatggttttatcaaccagtctactgctctcatagaccggcagagccattgtatcagcctgaccagtatagttagccttatggtcactactcttgtccatagcggctgctagaagcccgtagataggcttaccgccaagaagttcatcaactaataacgcaatgaaggccaccacagctaatggcatcaagtgaagtaaggaccctaccatctcagtaattaagataatcgccgtaaatggtgcacgaatgattgctgcaaaatatcctgccattgaaaaaatcactaggttaactactaaacgctgcggtaacaagcctaactgtaccatcatcagtccataagttgcaccaatcaaagcgcccattgtcaaaattggcaggaagataccactaggaagacctgaatcataagcaacaatggagaaaacaattctcatgacataatagaaggctagcatccctacaatgccccaacctgttttagtgattatattcggcaatgccagaattaaccgattacctggaccggtgattaatggccaaaagtaagcaatcgggattaatattgccaaaggaataagtccatgcagccaacgaggtaaaatggtgattttagcatagaccttctttaaactaaataaaccaactttatataaatgacccaataagcctaataaaatccctaagataagcaagtgccagtacaacgaaatcggaaatgaatagttatattgaattgctagggcgtgacgaatgccaaacaagtttgaaacgacaaagtttgaagcaattgcgccagctaaagcattcatccaaactaatggtgaaaagttatggaatacttcttctaagacaaacaaggcaccactcaaaggagcgccaaaagcggcagacaaaccacttgaagcccctgttgcaagcagaattctagtttttaatttgttctgcttgcatccctgagcaacaccttgaccaattgtcgagcccagctgcaatgatggtccttctggtcctaggaatagccctgtgccgataaccaagataccaccgattaatttccgccataaaattggaaaccattgtagtgatagcttcccttgcagttgcaattttacttctggaataccagaaccaccaacatggggatattgtttaacaaaataaccagcaattaccgctaccgcaataaagccaatgataatcgcaataaaccacaacggattctggtgcgctaattgaaacaagtataaccaaaaaccagatgtcttttcgattccaaatctaaataaaccaactactacgccggtacatattccgacaagtagtgcttggagcaacagtttaatattagttctgtttgcctcgtctttcattactttctccctcacaataaaaaaaacgtgtcacaaactattgtacaacaaaaagccagctagaaatgttccaatgtcattaagttaagacattgacaattaagggtgcttttttagagatcgaatcatttggattcgatctctttttttgtataaaataaaggcgaaaagaccagccttttcgcctatcttatatattatatattttaaaccttcaaaattattgccagaaagatggtgttaattatgaaagcccttcataagaatattctagaacgtcttgatcaaattatcaataatactggggatcatattcacgattttattaataatcctcatgcttttaccaggaaacgcactttagatgcagcgacagtccttaaaactacaattaacatgcaaggtcagaatttaaacagtgaactctttagagcttttggcgaagatgcaactaaaaagaacgataaagtagttagtacttctgcctatgttcaacgcaaaagccagctttctcctgcttgttttaaacatattctgactgtttttaatcaaaatctatttaatattcaactttttgatcatcactaccgtttgtttgccattgatggctctgactttaatcaaatctggaatccgaaatcgaataacattgtacaagcttcttctcataaaaagaaaccctattgtcaaattcacgttaatgccttatatgatctattgaataatacctaccaggattgtatttttcagcctaaatcagaaatggatgaacgcaaagcggctgttcaaatgcttaaagctttgaattgtggtccatatattgtaacaatggatcgtggctacactagtttcaatatgattgaaaactgcaatcgcctgcctaactgtcattacataatacgaactaaggctggacaaggcggagttaaagaaataacgacattgcctgatcaagaatgtgatcgtgagatttcctgcctggtaactacttctaactattactacatcacgcataaagccagtgagaatattcaccatgtccagcatcattatcgccaatatattaagtatcgctctaaaaatacccaggatctaagctgggattttggcgagttatgcacaataaaatttcgagcctgcaaatttagaattaatgatgccaaatcaggcaaagaagaatgggaagttgtgctaaccaatcttgatcgaaaaaattatccgctaaaaagaattaaagagctttatcatctgcgttggggtattgagacctccttcaagaaattgaagtattctttaggcagtgtacagttccattccaaacaagataaatttattgaaatggaaatttatgcccatatgattatgtttaatgcaatcagtcaaattgatgcacaggcctatattccgcaaaagcattgcaagtatcaatatgccatcaatttcaagcaatcatgcttgattattcagagcatgtatttggcttcttctttaacgcaagattttgaacggatccttattcagatcagctattataccattccaattagaccaggccgcaaggacaagagaaatattaagcccaaatcagctgtatattatttatatcgcgtagcttaaaaaagcagaatctgtgctatgccttatttgttgtacgaaaaaagcaccaatttaaccaattaaatgttaaatcagtgctttaaaagtctaatattaattgtcaatgtcttaacttaatgacattggaaatgttctaactgacttttttgtttcatgtgaaactaattatttttcttcataccattcggtgtggaagacgccttcacgatcatttctaaggtaagtgtgcgcaccgaagtagtcacgttggccttggatcatattagctggcaagtttggattaaagattgattccaaccagttaagagctgcgctcaaagttggagttggcacaccacacttagtagcaaattcaactgacttacgcaaagctggcaagttttccttcatcaaaccgcggaaataatcgtcttggaataggttcattagcttgccgttcttgtcataggctttttcaatatccttaagcattgcggaacgaatgatacaacctgcttcccaatcttgagcaattgacttgtatcttaagtcccaatcataagcttcagcagccattgtcaattgttggaaaccttgagcataggcaacagcttgggctaattgcaatgatttttcgaatacgtcaaccatatcatcaggaatttcaccattgtattcaaacttagttggtttaacgcccttttcaattgtcaagtgtgcttgcttactcatgaaacgtgccattacagcctcggctaccaccgttacaggagcgccaagtgcaacaccatcttcgagcatccagttaccagtacctttgtatgaagcaacgttcaaaatgtgatcgattacgtgatctggcgttaaatcatctttttgtgccaaaacctttgaagtgatttcgctaagatatgcttctaccttaccatgattccatttatcaaaaatttctgacatttcatcatcgctcttgtgagcaacgtcacggagtaagttgtaaacttctgaaaattcctgcataataccgtattcgataccattgtgcaccattttgacatagtgaccagcaccttcaggtcccatgtagtagacacatggcttgccttcagtattcttagcggcaatagcttcaagaattggagcaacttccttataggctggttcatcaccacctggcatcaaagctggaccattcaaggcaccctcttcaccaccggaaacacccataccaataaaatgaatgccgtgcttttccatttcgtggaaacgacggttagtatcgtgataatttgagttaccaccatcgattaaaatatcgcctttatccaaaagcggcagcaatttttgcaaagtttggtccactggatcgcctgccataatttgaatcaaaatcttgcgtggcttttcaagtgagtttacgaactcttcccaggtgtagcaaggctttaatttatcatcttcatattttgcgaaagcatcaacttctggtttgtcgattgagaaaccggaaacggagaagccgtggtttctaacattcaaagcaaggttcttgcccataacagacaaaccgataacgccgaattgttgcatgtttattaattcctccattaatcaaagttcatcaagtattattatacgttctagcacgcaaaaaagcgaaaccaaaaggttccgctttttaaaatctagttaataatttttttgttattgggtaaaggtgtttcacacactgctcggtaatatttcctaggaaatattacttttattgatcaataccccaaagtaaaatgttaaatgctaatggtaatgttagcttggtaatgtatccatcctttttagcctgttttaaagatgctagaacaaatttacgttgttgacccgttagctttttggctactttaacagctaaattaaagtcatactcgttttttctaatagcatttttgataactatctttgcccacagaaataggttgagaatcggagtttacagttacaatgtagctccacttgctaagtcgaggaatatttttaattgttatagctttatcaaacttagctactgcagttgaattgctgttgtctgcagcgttggcagtgacagacgatgctgaaaataatgctgcaagtaaagcagtagcaagtaaactaattagagcttttttagatttcataatttagcatctttttacacatagtgcttattggctaataagcattaattcatatccaacactgtctattataagcatctgtattctatttactagccaacaaactattttatatttaaaatcgtatataaaatgaggctatttcccaggaaatattttcccatacaaaaaaagcgggacaaacgtctcgcttctttataattactcaaccaaattagtgttgtgaagcacctgaaaccgtatcaggagcaggatcctcttctggttctgattcttcatgttgagatgcacctgttgcagcgtcagcttctaagccgtacttttctgcaaagtaactgaatggcttcaagtcttcagcttgatacttcttgacaaaggctgggtcgtcaagtgagttcaactcagttgagtaaggcatttcgtgagtgtacttgacgtcgatcaacattggaccgtccatcttcttgaattcgtcgacagcatcttcgaattccttcttggtgcgaaccgttacacccttaacattcataccttcagcaacctttgcccagtcgttatcagggataataacaccagataatggttggtgagattcatcttcttgttctgcttgaatgtaacctagtgtttcgttagtaaatacaatattcaaaacatgcatgttgtaacgagccatagtaagaagttcttggttcatcatagcaaaaccaccgtcaccagctaattgccatacttcacggtctgggtaaacagttgctgcagtaagagcagctggagcaccataacccatagttgcgtgcaagcctgaagtagtccacttttgatcatcatgcaagttcaaaagacggcatgagtcaacgttaacgttaccaacatcaatagcaaagatggcgttgtcatcagccttcttgttgataacatcccagattggttcaggacgtacaggcatttcatctgagttcttaaagcttgcttgccatgcatcccagttctcacggtctgcaatagcagccttgtaaagtggtgattcgctacgttcttcaccagcgtcaataattgctctcaaagccttcttagcatctgcaagcattgaaacatcagttgagtgacgcttaccaaacttagctgaatcaacatcaatttggataaccttagcgttcttagggaaccataaaactgagaatggtgagttgttacctacccaaacaactaagtcagttgcgctttggacttcttgagcagccttaggtccgatacggccgatagtacccatgtatgctgggaatttgtcttctactacacccttgcctaagtatgatgacataataggggtcttgaacttttcagcaaattccttaacttcttcaccagcatcctttgcacctaaaccaatgtacatggttgggttcttagcttctttcaaaagcttaacagcttcttcaactgaagccttagttggtgctggataattgtctgctggatgagcatccttgtttacacggaaggtgtcatcaatcttttgccaaccgtagtccttaggaataatgataactgcaggaccctttcttgcgtaggcttgacggatagcttcatcagttaaaattggaatttgttcagcggtcttagcttggcggcaccaaacactagcgttcaagaaccacttgtcttcatcaaaagcttggaagaagtcaatatcttgacggctagttggaacgttagcaacaattgctaccattggagtcttgtcaaacttagcatcatacaaaccattgaataagtgggcagcaccaggaccagctgaaccgaaacatacacccaacttaccagttaacttatattctgcagaagcagctaaagcaccagcttcttcgtgacgtacttcaataaatttcatcttatctctaaagtcatagatagcgttcatacttgagtcgaatgaaccacctgggaaaccgtagatatgatcaattccccaatcgtaaataactttaagcattgcatcagaaccattaatttttgtcatataagtgcatctccttaacttttgttctttcataatgtattaaaacactttttttcacatttgcaaaccgataaaatcaccgttattacgcaaatgaaaacgcttttgtaataataatcacttcacaagctttaccaaattcaatatctcaaaaagctgaatggtagcgttttatattgtgatttgatgaacattattatactaaatttcacttattttatgtatattcattgttacttatagtaaaaatttaagaaaaaattttttacaatttatttcatagctatccaatttagaaaaacgttattttataattttgcgcataaaaataacgtagaatactattcctacgctatttttgtgctattctactttttcactctagagtaacgcccattttgaatgtaaacactcaagattgccaagtcagctgggttaactcctgaaattcgttctgcttgagctaaagtttcaggacgaattttttcaaatttttgccgtgcctcagtagctaaaccttcgatttggtcataatcaatatctgctgggatttttttggcttcttgtctctttaagcgagcaattctggtttcttctttcttgatatagccagcatacttgataccaatctcaacttgttctttaacgtaacgatcgcctggaactttttcaccagttaaccgttcaatatcagcaatagtaacattagggcgacgcaagaaaacatcggccttaacaccggccttcattggttcctgaccaatactttgcaaaaattcctgcacctcatcagttaaatgaaccgtaatttcatgcagtctcgtctttgcatcttcaatcgcatgcttcttttcttcaaatcgtgcgaagcgttcgtcagaaattaagcccagatcatgaccatattcagtcaaacgcaagtctgcgttatcattgcgtaaaatcaaacgatattctgctctactagtaagtagacgatatggttcattcgtccctttggttaccaagtcatcgattaacacgccaatgtaagcatcgttacggcctaaggtaaatcctggcttatcttgagcagataatgccgcattaattcctgcaattaaaccttgaccagctgcttcttcataacctgatgttccattcatctggcctgcagtaaataaatgctttacgtttttggtttccaaagtatgcttcaattgccatggttcaaccacatcgtattcaattgcatatcctggtcgcatcatttccgcatgttctaatcccgcaacagaatgaatcatctttaattgaatttcttctggcattgaagttgaaaagtcgcctacataaacttccttggtagtctttccttctggttcaaggaaaatttggtggcgatccttatctgcaaagcggacaactttgtcttcaattgaaggacaataacgtgggcctacacccttgataattccagagaacatcggtgcacggtcaagattgtttctaataatcgtgtgtgtggttggattagtataagtcatccaacaagaaatttgtttttgtaaataatcttcatcacgactttcatatgaaaagtgccgtgggattttatcaccaggttcttcctcagttttagaatagtcaattgtattgccgttaacacgtggaggagtaccggttttaaaacgacgcagcttaaaacctaacttttctagattttccgacagcttaattgaaggagtagtgttatttggacctgaagaataagtcaattccccaataataattttaccgcgagccgctgtacctgtagtcaaaacaacgcttttagcatgatacttcgcaccagtattggtaatcacacctttgcagacgccatcttcaactaccaattcatccacgatagcctgacgcaaggtcaagttgggcgtattttcgatcgtatccttcatgtgttcatgatattgccacttatcagcttgagcacgtagcgcacgcacagctggccccttacccgtatttaacatccgcatttggatataggtagcatcaatgttctttcccatttgaccacctaaagcatcaatctcacggacaactgtccctttagctggtccaccaacagatggattacatggcataaaggccaccatatccaaaccaatcgtaaccagcaaagttttttgtcccatgtgggcacttgccaacgcagcttcacatccagcatgcccagcaccgacaacgattacatcatattcatttgaatcatatgttttaaccattttcatcctactttcctaaacagaattgactaaataattgcgtgattaattcatctggggcactttcaccagtgatttcacctaaagtatcccaagcaccagtaaaatcaatttgtgcaatatcaacagggacgccatcttcaactgcttgaattacatcttccaattctttcttagccttatgcaataaggaagcttggcgttgattggttaccataatttgatcattagaattttcaatcccagcaaaaaatagcttattaatcaattcttcaagcgcatctaagttttgttctttcaaaatcgaagttgaaataacatcactacccgttagtttctccatctcagtagttgttattttttgacctaaatccgacttatttaagatcacgattcgcttcttgtcctttgttgcttcaattaaggcttgatcttcagctgttaatgcttgactagcatcgattaacaacaagaccagatctgctcgctccaaggccttttttgatctttctacaccaattttttccaccttatcttcagtgtggtggattccagcagtatcaattagctctagcggtactccttttacagacacatattcttctaacgtatcacgcgttgttccagccacatcggtcacaatcgctttgtcgctttgagtcagataattcaataaagaagactttcccacattaggacgaccaacaattgcagtagccaaaccattgcgcaagatttttccttcttgtgctgtcttcaataagcgattaattttatcaattactgatctagatgtgtctgccatctgttttgcggtaacagtatctgcatcatactctggataatcgatattaacctcaacgttagccaaagtattcagaatttcctgccgcattgcctgaatcttgtgtaacaatccaccagctaattgaccaacagccacttgtcgtgccttatccgtcttggcccgaacgatatccatcacactctcagcttgagttaagtcaattcgtccgttcacaaaagcacgtttagtaaattcaccaggatcagccattcgcgcaccgtgactcagcaacaattgtaaaatatgattagttaccacgattccgccatggcaattgatttctacaatatcttcacgtgtaaaggtcttgggcgcacgcagcactgtcaccattgcttcatcaatcgttttcccagtatccggatcgataatatgaccatagtgaatagtatgtgtcggcaccttgcttagatcttcgcctttaaaaacctcatcagcaatcttaattgcatcctcaccagacattcttacgattgaaattccgccttcaccgatgggggttgaaattgctgcaatagtatcgaactctgtcaaagtttgagccataattcttcccttttctcaataaaaaaagcgcattataccaccacgaataaccatgatggataaagcactttgactactttatctaaaaatcattttagactaatattcttttatttctttttgcgtcctaaacgcttgtaagcccttcttagtttacgtttgcgttcacgctcagcctcagcctttgcttcttgctctcttctatatttaatagggttttgcaagataaaggtttgaagcgcctggaacaagttggaaattacccagtaaagtgtaatagctgactggaagtttaaggccatcacaccaaccatgatagacattccgtacatcattactttggtcattccattttgcgatgattttggcgtcgataattgactaatatacgtcgataagaacgtaaagatcattgctaaaataggcatgatgtaatatggatcgggcttgcttaaatccatccataagaagcgcccagtttgtaactgcggtgtacgtaaaatcgcaccatacagtgcatacataactggcaactggatcaggacaggcaaacatccagtataaggatttacgcctgcttctttataaagcttgttagtttcttgttgtaataatgttcttgattcagtgtcacgtcctggatatttcttacgcaactcattaatttgtggttggatgctttgcatcttagtagtacttcgaattgaaatagcattcaaaggtactaagatgacacgaacaatgacggtgaagacaataattgcccagccataactgttccccattaacttagctagccacaaaataaaagctgacatgtaataaacgatccaacggtcccaccaattaccacttgtatgtgagattggcgttgcttgaccatttgctcccgtagtagcacatcctgtcaatacaacagcaagtattgctactgctaagactgcaagaagacgtttgacatttctcttggtcagaatgtccttcaatctatttttcctcaactttatctggcatttcttcaataatatgagctaacgataatgcgtgaagcaagtttttacgcacctgagccatattaaaatcgcgagcataaggtcgcgtaatgactaaaaaatcaacatgcggattaatctgcaatttttcttcatcaatcacggcccgaatataacgcttgagtcgattacgtgcgactgcggtatgaccaacctttttgcccacagaaattcctactcgaaagtgtttattttctgttttttctaccttataaatgacaaaagctcggttagcgactgagtcgccagattcgaaaacttgctggaaatctttttcagattttactcgataagactttctcaaaacgtttcattccactctagtagactaaaaaaaccactgggattcagtggtttaagcagataagacttttctaccttttgcacggcgtcttgctaaaaccttacggccatttgatgtgctcatacgcttcataaaaccgtgaacacgtgaacggtgacgcttcttaggttggtaagttctcttagttgtcatattaaactgcacctccataaatttttgtgccaattgcacaatttcttattaaggatagcacgaaaagccataaaaaccaagtattttaagaaaaaaagactcctgaattgtcaaattaagtgcaacagttaggctatgaaggaacgtattgcttgaagagttcttctgctgtgtgatattggaggattcgacgatgtttgcggttaatggcatcagttgcctgttgaacataagcagctgacttatctttcatgcttttgcccttagggaagaattgacgcagaagtccattgcagttctcatttgtgcctctttcccaaggagaatatggatgagcaaagtagatctgacatcctttgattttggtcatatccgcaaactcagaaccattgtcaaacgtaattgatttaaaccaattaggatgtctgtcaatctccttttgaagcagtctttgacaagtactggcccgatagtcaggaattttgataacaacctcaaaacgagtggttctttcagtcagtgtcattaaggcaggttgatttttacgtctgacgcctttaaccaaatcgccttcccagtgcaggggaacttttctgttttcaacttctttaggccgctgttcaatcgaattgccaagattctttttatgcggagcatggccaccatgactatgatggcgtttgtttctgcgtcttttaagcttcattggcaggtcgatattgcttatatccagcaatccttgatcaatataacgatagacagtgggcgtgctaggacatggataatttggcataatcctgtgaaattcaccaacgaattcatcaatgctggtggcatcaaatttggctttaaagcgtctgcttagcattctgaaaaagacggcatagtgttgcagtggattacacttatagcagtttctgcggcgcttttcatgataaatttgtgcagtatcagcgtaatagtgctcatacaagacatagctgctgtctctttgcaggacactgcctcgtctaatttcacggctgatagttgatttatgacagcctacttcttgagcgatagcattgcaggaggttatgccagaatcaagcagagcttgaatttgtccacgttgttcgctgttcaattgatgataatgcttggaaatgctagaatttgagttggtcatgaagatcttcctttcttgatttttggtcacttcaagtttaggtcttcatggcctttttgtttaacacttagtgttgcacttcaattttaaatccgggagaaaaaaagacttttaaatcccgtgaatattttctaaaaattgattgtttttcatgtggataaaaaataaaatatttttcttacgtataatttccacaagataattcccaacgttttccacaactcacatggtgttaaaaacttaattcacaccatgtggataacgcatatggtattttacctcaagtattgatagaatagtatccataattcacagctgtactgtgcataaattaacagttttgctcttatcatgtcaaaatgtacatatcactttaatagttatcaacaggctgtgtactttgttgatttctttttcacctgtggaaaaccagttaagtaaatggtaaaataaatttgctttttactaactgggggaatgtaca

SEQ ID NO: 4 - DNA, 16665 bp, Lactobacillus crispatus
  source 1..16665: mol_type = other DNA
atgacaaaatcaacaaatttcaattactatgaagccgataacgtatatggagccttatttttccagtttcctaaggtattaatgtatggcgagcaatataaacatttaagcagtgatgctaaattggcttatatggtactgaaagaccggctcgagtattctttacgcaacaactgggttgatgagcaagggcacgtctactttatttttaccgttaaagaattacaagatttatttaactgcgctactgaaaaagccgttaaaatcaaaaaagaattgcaaacagccaatctattaaaacaaattcaaatgggatttaatcctaaaactaaaaagaatgaaccaaatcgtctatacctttctaaactcgatgtgaaagctactgatgtctatttaaggggcgaatatgggcaaaaaaagccggaatcccttactacgagcggaatttcgaaaatcgaaagtccgcatgacttcgttgaatcccttgctacgagcggaatttcgaaaatcgaaagtccgcatgacttcgttgacgacaaccctcaaacccttgctacgagcggaatttcgaaaatcgaaagcaatctatataaagactataaaaataatatagatactaatagatacgatatagatactcaaaagttggacttttccacaactaatttttcaccagctgaaattgaagcccaaaatcgagatctagtaaaacatgctgatgagttcttaactgacgaagataatgggttgccggtcttcttagaaccagaagcagttcaactacttagcttttggtgccgtaccccacaacaaatgcggcgctttattggcattatcttaaacgccaaatatgctgttgaaaaagagcataaggatttaggcgtatggattctattagacgatcctgatttaaaaaaaatgatgaccaaaacattaagacgctattttaatgctctaagaagcgacgagaagcatatcaagaatgttgagaactacctgtacggcaccatgcaaaacctatttggtgtttggtggaaccgacaagcagctagagaatatgcggccaaacaccccgaagaacagaatcttgatggcgagcgcgcttgggactaaaacgccatataagcccatttaagccacttcaagtgttacgcatatattttactaaagccactttaaaatcgcttagaagtaaaaacagataccttgagtgggcgaattggcgatagctaaactagaaaaatgggataggcgctttttaaatgaccaaaccaagcaaagaagttgaaaaaaattgagcaattgttggctgacccatgggcagtcgatattcaagacatttgggagcaagcagcccaaaatcgagatcctgataaatgcaagctgtttgacgcgttatacacttacctcttagataaacgccaagaacaaatcatcaatgaaaagcactttttgatttaacatagacagttcaaataatcaatgattgaaataaaaaggaggcacaaaatatggctaagacacgaacatatatggacaagtatagattcacaactgcggaaaaccaacggtttgcccgagcaaattttaccaagttagtgcatactaatgctcgctttgaaggcgttaataccacattgccacaaacacaaactattatggacggtatgagcgtagcaggagtacctgttgaagatgttttgacgattgttaatttaaagcgtgggtggcaatatatcactactcaaaattcccctttaacgttaaccatggaaaaacaaatcaacaaaattgtggcagcagaagacgccttagtaccaggagaattacggcaagggaaagggggagttaatttaggtagtgaagacttttttgagccgcctttaattaacgaaaaacaggaacaatcctttttacaaaaaatcttgactgatccacgaacgacgattactgataaagcattgactgtcatgtatcataatatgcgtcaacaaatcttttgggacggaaacaaaaggacggcaactttaagtgccaataaaattatgattgacggtggcgctggtttaattaatatcccattagataagtgggatcaatggaacgaactaattgccaattattatcggactaatgacatgactgaagttaaaaagtggacatatgataatggtatccaaggattacaaattcgagcaaacaaaaaattaagtgttaatcacaagtagtaaattatgtatttaatatatctaaatatgcctattaatgatataattgaccgcaaagaaagcaggtctatttttatgtcaagaatttataaagttggcgaagctgctaagcttctcggtgtatctcgctctaccatgcaaagatgggatcgagaaaaaagactagttgctcagcgcaatgttgccaatcgcagatactatacgcaagagcggctggatgcttttaggggcattaagcctcaccgcaagacagttgcttatgcccgtgtttcttctgtaggtcagaaagaaaatcttaggcatcagatggctttcatcattgaatatgccaatgctagaggcatcattattgatgaacatgtagaagatattggatcagggcttaattataaccgcaaaaaatggaataaattattggatgaagtagaagcaggaaaaatagaacgaatctttgttacctataaagatcgttttgcccgctttggctttgattggtttgaacatttttgtgctaagcacgatactaaaattattgttttaaacaaccctgaaacctctccagatgaggaaatggttgaagacttaatttcagtaattcatgtgttttcatgtcggctttatgggttgagacggtacggcaggaagattaggcgggatttaaagaaggaaggtgaaaagagtgatcatcaaaaccagaacatatcgattaaaacccaatcaaaggatgaagaaggttcttgattcgctttgtgattacagacgcttcagctggaatctcggtttagaaacctggcaaaatatgcatgaagccagacaattggctttaacccagcatcttaaagcagaacttaaaaagcctagaaaaaaacaaaagcttacaaacgctgaaagagaaattctcgcaaacaatcctgtcccttcctggcgcagaattcgtgatgagctgactgaaaacaagcaatactggcagacaaagcttccagctcatgtctttaatttggcgatccaagacttaggcaatgcttggcagaatttttttgataaagcgcagccaggctggggaaagccaaaattcaagtctaaaaaagcacctaggcagggatttaaaatggatcaggccaaaattaaggatggctgcttatttttagaaaagcctagggctgtcaaagaaacatggaacggctttaaattaagctctgctccattgtcggatgatttcggaacaatcagcttttacaaagaaaaaaacagatactatgcatccattccttttaaaatatctgatccagaagacaagcctaagacaggcagatatacaggcgtggatatcaatgttggacatttcaattacagagacggtcaatgcatagtaatgcccaaatcgttagcagcagtctattgcaaaatcaagcattatcaaagacagctgtctaaaaagcgtgtcgtcaatggtaaaatcaaaggaatgcaaagcaagcgctacatgaaagcgagaaacaagcttcaagcagcttacgctcgtgctaaaaatattcaaaatgatttgatgcagaaatttaccacaaagctggttagcgaatatgattctattgtgattgaagacctaagcgttaaaggaatgcttatgagtcatgttgcctccaaaggaatgcacaggtcaatgtttggcagatttagacagatattgacttataaatgcgaatggtatggcaagaaattgatcgtagccaataaactgtacccttcaactcaaaggtgcgcagcctgcggattagtgaaaaaaggcgatgaaaaaatcactttaagaggcaataagaagcatggcaccaagcataatgaatttgtttgttataatccgaactgccgtaactataataaaaaagttgaccgtgacgaaaacgccatgctcaacttaataattctggtaaaacatccagaattaaataaagccttataaaaagaatgcgggcgaagctacgtccgaaaaagaagtcaaaagagtcggtcaatgcgattactcccaagttggaatatcggaaaactgatgaagacgttgataagaaaagcataggcatgttaagccataatgactacaaataaatacaatgtagttgtttgcatatgtttttcatagctgctaatgaattgaaccagatgtacaagcaactaaaaaaacggataaattagaacttaaattagttcctgaattgtcaatttaagtgcaacagttaggttatgaagagatatattgcttgaagagttcttctgctgtgtgatattggaggattcggcgatgtttgtggttaatggcattagttgcctgttgaacatatgcagctgtcttatcgttcatgcttttgcctttagggaagaattgacgcagaagaccgttgcagttttcatttgtgcctctttcccaaggtgaatatggatgagcgaagtagatctgacagtttttaattttagtcatatctgcaaactcagaaccattatcaaaagtaatagtcttgaaccaatctggatgctggtctatttctttttgaagcagtctttgacaagtacttgctcgataatctggtattttgatgacaatttcaaaacgagtagttctttctgtcagagtcatcaaagcaggctgatttttacgtctaacgcctttaacccaatctccttcccagtgaagaggagttgctctgtcttcaacttctttaggacgctgctcaattgaattgccaagattctttttatgcaaagcatgcccaccatgactatgatgccgtttgtttctgcgtcttttaagcttcattggcagatcaatattgcttatatctagcaaaccgcgatcaatatagcgataaacggtaggcgtgctggggcaaggatagcctggcatcgtctgcttgaactcacccacaaactcatcaatgctggtagcatcaaatttagttttaaaccgcttagacagcattttcagaaaaacagcataatgctttaactgatcacgcttatagcagttcttgcgtcgcttatcatgatagatctgcgcagtatcggcatagtaatgctcatagagcagatagttatgatctctttgcaggacgctgccacgtctgatttcacggctaattgtcgatttgtgacagccaacttctcgagcaatagcggaacaggaggttatgcctaaatcaagcagagcttgtatttgtcctcgttgtacactatttaattgatgataatgtctagagatgctagaatttgaattggtcatgaagattcaccttccttgatttttcgtcacttcaagtttaggtcttcatggcctttttgtttaacacttagcgttgcacttcaattttaaatccgggacttaccatttctgttagaattgcaacttgttctttggtaaatcgctgttgttttctaatatcacttaaatcttttgtccacttagaatttttttcattttcttctgctaacttcataagatgatgaattacttcagcattattttttaaatcgtgttcctctttataatcttgaatccaatctaaatctgtatcagaaattgtcgctctaaaagttgtcttaatcattttttctggtcctcttaatcagcgtaagtttcttgtctttttttcaaagcattatcaatcttttgattaattttttgtaactcttccagttctttttctttttgaacacctaacatggcattgaagaataagaacttataaagttgaccattattatcaaagcaatgttcttttctaatctgcctaatttcttcccattgcttatcgttgagtcgaaattgcaaaaagtgctgtcgtcccatttcttgccctctttctaaatttaatcatcttcttttgccgtgtcttctgacaaactatctaacaaatttaatgctcgttcggtgtcattaacatctccactaatgaaatactttgcaagaacattcagccctaataaattttcctgcagaagtttattctgcttctgaatcaataaactagtttgcgaatcttcattttgattttgaaaattaattggaatttgttcaatttgttctctcaaaaattgatttctggaaattttcttacttgaattttgatttaattgattaacaatccgatcaattctagccaagttttgttcgctgattccacggattaaaacttttaccataatttttctttcctctgatttctagtttctagttttccttctagtttctactctgaaatttgactaaaatctgcttcttttagttatctctagtaaagagcataagggaaatctgaccccacgccttttatcaaggtgtgctgggcttggttgtaccaagcgatttcgcatttttagaagtgatatcacttctgattaatttgacgtctatatacttctaaattgttcgtcttttacctgacattacgtcttgatacgtaatgtttttttgtaatatccgaacaggacgtattcttacgtagctcattacgtccaagacgtaacattttttgctctatttttgagtctagttatcaaaatttctattttttaactctaaaatttcttcaacattttcaaccaaaattcctaaaggcgacgcaatttctcttgtgcttttgccaatttcccgatattttttaactcgaaaaattaactcttgagaatattctacaggttccttatcacgctctatctctttaacttcaacatttctagcatgatacctctgcatcattttttgcaaagttccttcaagaatatcaaactgatttacaaattctttcgctaaaattttagaaaccctatttgactttttagcttcataaatcatttttctatatctctgcttagaagcccgagaagctttactatagaattcaggattatgaaccaacgcataaatcatcatttgcctatttaaattttcctcatggtcccaatctggcaaataaaagttttccagcatttctctaacttcctgaacataattttcaatttttgaaccacgcaactgcatttctaatcgccaaagtgaatcaacatttacaattcgtccatgcctttgttcttgttcaatttttttattatacaaacgaatttgtctctcacttgaacgcgcaccgaaatataccgtttgcaattccccattcttaccatagaaaaactttttagtcattccccagcgccatacctgataatactgaatctcagaatcattataaatatcaaaagctacatcacaacgtgaataatgcttattttgaatttttgcaataatttctctaagtagccattgaccagctggagtattcatcgaatgattgggattaaagtcaattctaatcttatctttttgaaacctaggaacttcaaaatatgcaacttgcccaggcgattacagacattaccggcagaattattcatttagacagctgccaggcataccggcatgacatgcggctgctgcgtgattagctgatatattataatttttccaattattgtaaatatcaattttatcttgtttggataatttagacataaataaaaaccccgaaattcttgtccgaatttcggggttcatatcaataaacactttagctgcttttctattattaaactaaatcatacatttctggcattctgcaccattttgaattaaacattcgtctgcagtcaagttctcactaccagctaaaactttttctcttattctaacataataaattgagttgcagcgctttttaaaggcataaatataagccttatttaaatctcttgttgttgcattatcttcaacaaataaagttaacgaaattgattgatcaacatacttttgtgcagcagctgtaatatcaataatagcattaggtcctacttcatatgcacccttttcgtaatactcataattgtctttattaatcttataagctggtacataaattcgacccaaatcagcctctttgcgtgtttcaacaggagctactactggctgcaaacttggtgtacatgaagataaataactaattgatccagtaggtgcaactgctaacaagttagcattagctatacctgtctttttaattttagtaatcaattcttcccaatcttctttagttggaataactaatttatatttagctacaatttctttaatcttgtctgttttcggtgagacttcctcatcaataaattttttgaaataatcaccactagcatatgatgaatctttgaatcctttaaaagcaccatacttttcagctaatttatttgattctttaaatgcatggtatgcaattgtataaaagaaaattcctgtaaattcaactgcttctggtgaatcataataaatatgattagttgctaaaaagccatgtaaattcattgctcctagaccgattgctcgattagctttatttcccttttcaattgaaggagcacaatctaaatctgaagacctggcaacacgattaagcgcttgaacactatcagaaaccaaaccacctaacttgtcagcgctattcattgctgctgcaatattaagtgatcctaaattacaacaaacatcgtagcccgtcttattaaaacttaagtcttcattataggtacttggcgtattaacctgagcaatttctgaacataaattagacatcacgatccgccccaatttcttttgtgggtttcttcgattgacagtatcttcatacataatatagggataccctgattcaaattgaacttcagcaatagtttggaagaattttctagcactgataaatgtctttttaatacatggattattaaggagattttggtattctttagtaattgaaatatctgacattggtttaccatattcacgtttaatatcatatggtgaaaacaaagccatctttttattttctttggctagttcaaaagtaatatctggaatcactacgccaagtgataaagatttaattcttaccttttcgtcagcgttttctcgtttagtatctaaaaattgcagaatctggggatgatgggcacttaaataaactgcaccggcaccttgtctttgccctaattgattggcataagaaaatgaatcttctagtaatttcattacaggaattatcccactagataaattcttcatttttttaataggtgcacctaattcacgcaaattagttaagcatagagcaacaccaccaccacgtttagataattgcagacttgtgcttattgctcgtgaaattgattccatattgtcttcaactctgagcaaataacatgaaacatattcaccgcgtctctttttacctgcattcaagaaagtcggagttgctggctggaaacgattactaataatatctttaactaaattcaaggccagttcttcattgccatcagctaaaaataaagcattcataacagcccgatcttcaaaacgttctaaaaattgtttattatcgtttgtttttaaggcatatgctttatagaatttagctgcacccataaagttcaaaaagctaaaattttgcgcataagctaatttgaaaatttctttaataaatttagctgtatataaatctagaacttttttatcatagtaattattatcaactaaataagctaatttttcttctaaagaagcaaactttttcattcttggttcaatatgattttcaagatattgcttagtagcttccttgtcagctttaaaattataatttcctttttcatctttaaatttagcaagtgcatttaaagaaatatatgaatcattattaagatgatcagtcattgtcctcacctgcatcagcaattattttattaacattatttacatcttcagttgttcccagtaactcaaatttatatagataaggaacatgtaatttcttagaaattacatcccctgccaaggcaaaagaattaccaaaattggtatttccactagcaataacaccaatacatttttgccgattagccaatttgttcaaaaagtggataacttgctcaggcacagcacctgtagtcccatggccaccagaataagttggcgtaattaaaatatattcttcagaaactgaaatttctttactgagtttaataggaatcctaatagaattacaatctaacttttctacaaagcgtgctgtattatttgaagtggaagaataatagacaactaatggctttttagaaatcccagtcatcatctttagtctcctctcctgttcccattacatatgaagaaccattaccagaaaaagaaatcatggttttcatcagcttgagctgataattgagcgaatacttctggggaaatataagtttcttctgcggtaaaaggagtatcatagcctaaattttgtaaaaatttacctgcattatacaaactgaaatgaattgcatcatcaaccaaatcaaaatcatcataaagctcgtgcaaatatttcttttccaaatcaattagtttatctaagaaatcaaaaacgaattttttcatttctgcttgtttagctggagctaatttctttacggccaattgatatttgtaaccactataataattgtgaataaccttatctcttaagatcaatctaataatatcagcagtattaggcaatttacctcttgcagctaaataaaatggtaaataaaaaccaccataaagcaggaaccctggcataattgctgcggcaacctttgatttaagcggatcattgcctgtataatacggaattaccgctttagctcttgcttgtaaagcatcattattaactacccattcatgcgcttcttcaatttgttcactagtacataaagtagaaaaaatagttccatatgatcttgcatggacagcaaccataaaagcaaaatttgcatagatagcttgctctatatcagtttgtgaatttttaatttgggctacatcacccacacttgattgagttgtatctaataaagtcaatccagtgaaagtgcgagttataagctgttgccagtcatcagataattgattccaagaacttatatcattcgaaactgggattttttcaggtaaccaaaagttttgagtaactctgttccaaacctcaagatccttatcatctttaatgtcattccagttaatagctcgcatatttttgccgttgttattgtaagcaaattcaactggtgactgtgaatgatcataataactcatatttgtatttgctcctatcattatttattgttttatctaatatttgtgtgaacataatatagcatcttctgctcaataatacaacatgtggatttttggctatttataatcaatatattgtggctaagccgttttgataatacaaaattattttcaaatttattttatcttccaaaaataatgtaggtgttgttttttgcttttttgacaaaaaaatctccctgaattgtcaaattaagtgcaacagttaggctatgaagagatatactgcttgaagagttcttctgctgatagcgctgaaatttcaaatagaattaataccgataacgatcaggatcaggatcagcaaggtgataatgcggaaacaaattttgaatattccgatgatcgtgatggagatgaccaataaataattaaaaaaaggagtagacaaaatagcattaagtcagaaattagctttgaataatgattttcaaaacaaaaaagccctgctattatgcagagccaccgcgcgttcgcaagttatcgtcttgctgcgcatgcatccatgatcattggacgcgacaattttcctacatgtattataacatgctaaaataaaaatgcatgtcattcatgcacattctagggttggctcaatcaaccaccctataggaggtgagagacgttggacgacatgacaattttcctaatttgcgttctgctacatgagctccatttagttcttcgggaactaaataatctacttgataagtagtcatcattagtagacgcgaccagagtcatcggcagttgtatagtcggtgacttttttattttgcattctttaattctctaaagcgtcgataaattggtgttttggagatccctaatttcttgctgatttcagaatagctcctgtatgcaacctccaggcaaaatcaatttgttctggagtgtactttcgaagcataccatcatggaggttggtattattagctttcgctcatgccttgttttcccaagatgaaaaagtgcgacagatcaacgcttttttatttttttggtcaaattttagaaatatgctaaataaaaaaagcggtcaaacgaccgcccacgttttgcatgcctcgttcatgtcgacagcataacactaatcctttaatcattataacatgataaaatagttatggcatgcttttgtgcccctacactgctgtaaaaggctagaaaggagctgtatcatgtcagatgttgtaacactaatcctaacaatcgcacttttgaatgaattacatttagtccttcacgaactaaaccagctattaaagcactagtgcaaaaagtcgtccttcggggcggcttttttgtctcttaactctctaaaacgccggtagatagttgcttttgacatacctaatttccgactgatttcagaatagctcatgtggtcttgagtatggagcttccacgcaaaatcaatttgttctgaggtgtactttcgaggcataccatcatggaagttaggattattggcttttgcccatgccttgccttcctgggttcggttcacgataagatcacgttcaaattctgcaaatgcactgaatacagtgaagattagacggccacttggtgaattatcaatcgtaccaatatttaagacgcgtagaatgattccctcagcatttaattgtttaacaatgttcaatgcgtcctgagtattacgtgctagtcgatctaatttggtgacaattagggtatcaccactaccaatttgagccatcaatttatcgaattctggtcgatttgctgtggtgcctgtgtatttatccttaaagattttggtcgctcctgcctgttttaggtcttcaacttgagttgcatagtcctgctgagtagttgaaacacgagcatagccataaatggtatttgtcatatatttcctttcaattatgaatacaagttatgaatatggcttatgccctatcttagaagattctacttttgtattcaagactttcaacttttgattacaaaacaaaaagcagtttctaaaaagaaactgcttaagtattattattttcaataattaccatttaatgttagaaatagaagatcaaaagtagagaatgaaaatgtaaaagtaggagtagagaataaaaatgagaaaaaagggctggctctttctaacagccagtcagagtactcaaatctgagacaaaatgtaaaaattagcatagatcgattaacaattgttggagatttttcgacagagctttttaaaaaattagttcgtaaatggctgactttttcttttattagatcttcgggagctggttttgaggtattagattattcaaattgcaggtttgatgatttcggtaatccacatgaggaaattccgcctgggcttttaaaacgtgctgttttttcttgccggaataataagctgcttgtctttttttgggcgttgaatctttacttcagtggcatcgattaagacaacatcgtctggcttgatttcttgcttgccaatgttaaagccatgcttagccaaagtctcttcggcccagtggcttcttctgatcaggttgctgtcatgcacaccgtaatcggcagctatttgttcataagtacggtattccttgaggtactgcaaagtagccagaagcaggtcttcaattgccagcttgagctttctgccgcctcgggcatgcttgacttgatattcggcttttaatactttgaccatttcgtcaaagacaggcttggcaacgccgatcagacgcttgaatctggtattgtttaaatttttagctgtttcgtatttcataatttaagattatagcagatgtttcgcagtaactctattaactaaagaaacaaataatgaaaggcatggttggctttggaaaataacgcattagctaataacgtcaaaatacgctgaactgagtttgtcgaaataccggtgagactggcgatagtcttagccgggagtgatttactggctagcttcagcacatgagtcgctagtccgtgaccgatggcgtggttggttgataccactggagtggtggccgtacaagtgctatggcagttactacaacgccagcgttgcttgtttagctctagaattacgggccggtccatggatcctgcaatgtggacatgagtgagcttgtgtccgttagggtgcaacatattgtatccacagctgggacagcgcctgagtgtgtaggtaagctctgcctggatgaccaaatactttttgcgacccgagccccgaccatgaaattcctcacgagtaccgaacacccgaatgtttgtgtctgtaactcccagtaatttaagtgtattatctagttgagacatctattcctacccccgcttatcttgagtttcgtcgcttaaagcatagcactagggaggcttagatgcctttttttgttatcaaaaagggcctagtacttttggaatggaaatactttccaacaccaaaaattctagaccccttaaatttgcgatctaccacgtatgtttaaatcaaatttattttaaatataccttgtacagtgaagtttattgattgtgtgatttatgataaaagattaatcttttatcataaatcacacaatcagtaatacataagttaagctcaatcttatttacgtttggcaaggccttcacgaataattttttctaagacatcaacaatttttttgtcattctcaaaagcgatgcgtttaacttctttatatgtgctcatgcgaagttgaacggttttagttctttctgtttcgaattggtatggactttttagatttttaagttgttcagatgcctttttactaactttgtttaaaaaatcttctgccatgataaattactcctctaactgttgaattctaagtagttgttcattaagaaccatttggtacatttggattgctcttttatcccaatggtctttattccgtattccttcattagcaaacgttttaacccgttcttgagttctaattgagtttgaaaagaccccttcgccaaaaaagtcttttgcttgtgcagaaatttcagtatcaacttttgcacgtggcttcattaagtacaatatgacaccaactaactgaaaacttccattgtattgttcacgtagttcacctaaatgcgtagctgtttttaaagaacttgtatatgactgcttttgagtttgtaagacaattgagatgaaatctgaagccatgattgcgttattagtaaagacatttattgttggtggtacgtcaataaaaatataatcgtaattttgttttaattttgaaagcatttgtggtaatagaatattacgtttaacccgactaactttttctacagcaccaatccataaagacaatgtccaatctgtaggaatcatatcaatttggtttgtaacagacacaatagatttagacaaattccctccaagaaggccctcatataatgaaagttccggctttaaatcggctttataagtctccttcataatttcagttgcatttccctggggatcgaaatctatcagtagtacttttttcccctcttgacccaataaataggtttccattacagtcaaggtggtcttaccaacgccacctttaaagttgaagtttaatagtgttttcccattcatagtagcacctacctttacataaacattttaccatgatttatgattaatcgcaaattttatatgatttatgattaatcataaatcatatccatgaaaatatttacttaacctttgcagaatgatatgctttgttcataaacaaaaaatcccaatacactcgggattgggatttttgcagtattgacaagtagctatcttgcagctacctagtccaagcaattttcaccgccgagttaaaattgcttgaacaaattgtaatcttgtttacgtgctaattataccgcaagcaaaccttaaagggcaagcaaaggtaaactaattaaaacgaagacaagaccaatggactaagtagcttctaataactacttagtccatttttagttcttaaaaattaaaaaagttgccgactgggcaacccagaatagacacatgctggtgaaactacaaagccgatcacgaccaatatccgctttgtaattctattaaagcatatcagatttgtattttaaagcaagtcagatgttttagcaactctcttttgagacagcgtgtgtcagtcaagaaagggagtttttatt
